United States Patent Application Publication US 2009/0070897 A1 - sequence listing, part 5

SEQ ID NO: 18587 - protein, 477 aa, Arabidopsis thaliana
MQRFAAKRSVQNISVSLWRRCISSTSQAATASVKDSDEFQARLPPFAYTPPPYTGPSADVILSKRKEFLSPSMFCLYRKPLNIVDGKMQYLFDESGRRYLDAFAGIAVVNCGHCHPDVVEPVINQIKRLQHPTVLYLNHAIADFSEALASKLPGDLKVVFFTNSGTEANELALMMAKLYTGCQDIVAVRNGYHGNAAATMGATGQSMWKFNVVQNSVHHALNPDPYRGVFGSDGEKYAKDLQDLIQYGTTGHIAGFICEAIQGVGGIVELAPGYLSAAYDTVKKAGGLFIADEVQSGFARTGNFWGFEAHNVVPDIVTMAKGIGNGFPLGAVVTTPEIAGVLTRRSYFNTFGGNSVSTTAGLAVLNVIEKEKLQENAAMVGSYLKEKLTQLKEKHEIIGDVRGRGLMLGVELVSDRKLKTPATAETLHIMDQMKELGVLIGKGGYFGNVFRITPPLCFTKDDADFLVEAMDYSMSKM

SEQ ID NO: 18588 - protein, 357 aa, Saccharomyces cerevisiae
MSQNSNPAVVLEKVGDIAIEQRPIPTIKDPHYVKLAIKATGICGSDIHYYRSGGIGKYILKAPMVLGHESSGQVVEVGDAVTRVKVGDRVAIEPGVPSRYSDETKEGRYNLCPHMAFAATPPIDGTLVKYYLSPEDFLVKLPEGVSYEEGACVEPLSVGVHSNKLAGVRFGTKVVVFGAGPVGLLTGAVARAFGATDVIFVDVFDNKLQRAKDFGATNTFNSSQFSTDKAQDLADGVQKLLGGNHADVVFECSGADVCIDAAVKTTKVGGTMVQVGMGKNYTNFPIAEVSGKEMKLIGCFRYSFGDYRDAVNLVATGKVNVKPLITHKFKFEDAAKAYDYNIAHGGEVVKTIIFGPE

SEQ ID NO: 18589 - protein, 322 aa, Xanthomonas campestris pv. campestris str. ATCC 33913
MTASPSKLAQLRDLSVVVADTGDYDAIKRLKPVDCTTNPTLVKKALDLPVYADLIERELAWGRAHGGEDRNSTINEVADRLTVGVGTMLSELVPGRVSTEVDADLAHDTQATIAKARKFIAMYAERGVSKDKILIKIAATWEGIEAARQLQQEGIDCNLTLIFNRSQALACAEAGVFLISPFVGRILDFFVAKGQTPASIDEDPGVVFVRGVYDEFKRRGSSTVVMGASFRSTAQIEALAGCDRLTISPDLLEKLDADHGDLPRKLSPLNADNAAITPINSDSFATDLAADDMATEKLASGIDTFAKDLEALRKTIADKLAG

SEQ ID NO: 18590 - protein, 509 aa, Oryza sativa
  unsure (1)..(509): unsure at all Xaa locations
MMAEALREVLPLPYFPGQPCWYLQERRGAEAWSAEENKVFERALAQVDLDSPNRWEMVAAMLPRKTVIDVMNHYRDLENDVGSIEAGLVPFPHYSSSLSPASSGFTLQDWDGSDGGFRRGCYLKRGRAPDQERKKGVPWTEEEHKSFLMGLKKYGRGDWRNISRYFVTSRTPTQVASHAQKYFIRLNSGGKDKRRSSIHDITTVNLPEEDTSNPSPSPPSVLTTASDQLGSLVXDTKPVPPPPSLGAQRHFMSPLPGALGVSHHPYGNVKLEPNASFLAGGDAMRTLVTAVLSGGEPHKEEHRAPPPIISTGTTRLRPSRSPVSVCDWLASWLQSCFMRLRIAKYWTEGPLTGYCFDQEHQGFPRKRKRKALLDRCDYTIHCMNLSLDCLFGKPHRPASAGGQCISTPTPSAIPIPDRMHGEIGDHRPEIKWHRCYCRFVLCSSDFCSCEVEESASTGGGALLSSICSAIGHGRESESIIDAIALLGRHVRPRLRANIQILQMDDIIEE

SEQ ID NO: 18591 - protein, 287 aa, Nicotiana excelsior
MAENKEEDVKLGANKYRETQPLGTAAQTDKDYKEPPPAPLFEPGELSSWSFYRAGIAEFMATFLFLYITILTVMGLKRSDSLCSSVGIQGVAWAFGGMIFALVYCTAGISGGHINPAVTFGLFLARKLSLTRALFYMVMQCLGAICGAGVVKGFMVGPYQRLGGGANVVQPGYTKGDGLGAEIIGTFVLVYTVFSATDAKRNARDSHVPILAPLPIGFAVFLVHLATIPITGTGINPARSLGAAIIFNHDQAWDDHWIFWVGPFIGAALAAVYHQIIIRAIPFKTKS

SEQ ID NO: 18592 - protein, 583 aa, Corynebacterium efficiens YS-314
MNQPPQDRWGTTLSGARNTMSPTTAPAQAAKPARPARKPKPEGQWKIDGTAPLNHVEEVKQDEAAFEVKQRVIDIYSKQGFSSIHPDDIAPRFKWLGIYTQRKQDLGGELTGQVPDAELQDEFFMMRVRFDGGQASPERLRVVGEISRDYARSTADFTDRQNIQLHWIRIEDVPTIWEKLESVGLTTMLGCGDVPRVILGSPVAGVAAEELIDATPAIDAIRERYLDRDEFHNLPRKFKSAITGNARQDVTHEIQDVSFVPSVHPEHGVGFECFVGGGLSTNPMLAQPLGAWIPLDEVPEVWAGVAGIFRDYGFRRLRNRARLKFLVAQWGIEKFREVLETEYLERTLIDGPEITTNPGYRDHIGIHPQKDGKFYLGVKPTVGHTTGEQLIAIADVAEKHGISRIRTTADKELLFLDIEREKLTEVARDLDEVGLYSSPSEFRRGIISCTGLEFCKLAHATTKSRAIELVDELEERIGDLDVPIKIALNGCPNSCARTQVADIGFKGQTVTDADGNRVEGFQVHLGGSMNLDPNFGRKLKGHKVIADEVGEYVTRVVTKFKEQRTEGEQFREWVQRAAEEDLS

SEQ ID NO: 18593 - protein, 481 aa, Oryza sativa
RPGPYMPRPPAVPEWLNTGDNGWQLAAATFVGLQSMPGLVVLYGSIVKKKWAVNSAFMALYAYASTLIVWVLVGFRMAFGDRLLPFWGKAGAALTEGFLVARASVPASPRTEPFYPEASMVLFQFELAAITLVLLAGSLLGRMNIKAWMAFTPLWLLFSYTVCAFSLWGGGFLYQWGVIDYSGGYVIHLSSGIAGFTAAYWVGPRLKSDRERFSPNNILLMIAGGGLLWLGWAGFNGGAPYAPNITASIAVLNTNVSAAASLLTWTCLDVIFFGKPSVIGAVQGMMTGLVCITPGAGLVHTWAAILMGICGGSLPWFSMMILHKRSALLQKVDDTLAVFHTHAVAGLLGGFLTGLFALPDLTAVHTHIPGARGAFYGGGIAQVGKQIAGALFVVVWNVVATTVILLGVGLVVPLRMPDEQLKIGDDAAHGEEAYALWGDGERFDVTRHEGARGGAWGAAVVDEAMDHRLAGMGARGVTIQL

SEQ ID NO: 18594 - protein, 157 aa, Musa acuminata
MAGESCNLDKDEAEIFKPSPSSSPSPSPPSPPSSSQPPPPSSVLLKPSEESGIQRPEIPESPPAPTITFAASSTPKLDEEPSNPGEESPAPVRFSNRCSACRKKVGLTGFRCRCGDLFCGRHRYSDAHECSFDYKAAGREEIAKANPVIKAAKIIKI

SEQ ID NO: 18595 - protein, 894 aa, Musa acuminata
MNSVRSGFLIQAAFLVMISGSSNMGVSGLGSMSSIAVSYGENGPVFCGLSSDGSHLVACFGADASIVYGAPLRLPLLGLTAGDGFVCGLLLDTGQPYCWGSNIFVKMGVPQPMAEGASYSEISAGDDHLCALRKPAIDSRKGASLIDCWGYNMTASHEFDGSVAAITAGSVFSCGMFIHNRTAFCWGDETSSGVISLTPRNLRFQSISAGGFHVCGILENSQVFCWGRSLETQQLSLGHGDVKMVPMDPMVSVAGGRFHACGIKSLDHKAVCWGFMLQNSMPPPKDSRLYEIAAGDYFTCGVLAATSLRAVCWGTGVPWSIPMAVSPGICASNPCGQGYYEFSHTSWGNKVCKPADSRVCLPCSVGCPEGTYESTPCNLTSDHGCEFNCSSCASVECSSFCSSQKESKSKRLLSLQMPIFIAEIVFAIIFVSSVFLVACLYARHRLQSCRCLESAVTTSRKRTYSFHKEMVKVRPDLEELKIRRAQMFTYGELEKATSGFSEESLVGKGSFSCVFKGVLKDGTVVAVKRAIRVSDVKKNSKEFHTELDLLSRLNHAHLLNLLGYCEEGGERLLVYEFMAHGSLYRHLHGKDLCLRKRLDWVRRVTIAVQAARGIEYLHGYACPPVIHRDIKSSNILIDEEHNARVADFGLSLLGPVDSSSPLSEPPAGTLGYLDPEYYRLHYLTTKSDVYSFGVLLLEILSGRKAIDMQFEEGNIVEWAVPLIKAGDISAILDPVLKPPADLEALKKIAAMASKCVRMRGKDRLSMDKVTTTLERALALLMGSPCNEQPILPTEVVLGSSRLHNKASQRSSNRSCSENDTDDQIYEYRAPSWITFPSVTSSQRRKSSASEGDAEGKNSEGRSLGHGGAGDGLRCLEEEIGPASPQENLFLQHNF

SEQ ID NO: 18596 - protein, 393 aa, Shewanella oneidensis MR-1
MTEGKLVTERQLATLAVRQGIESDTQYGAVVPPIYLSTNYAFDGHKNPREFDYSRSGNPTRSILGDALAKLEKGATGVVTCTGMAAITLVTTLLGPDDLLVVPHDCYGGSYRLFTNLAKKGQFKLLVVDQTDNQALAQAIAQQPKMVWIETPSNPLLRVVDIEAIAKASHGVGALVVVDNTFLSPILQQPLLLGADIVIHSTTKYINGHSDVVGGAVIAKDPQIGETLHWWSNTLGLTGSAFDSYQTLRGLRTLAVRIREHQRNAQRIVELLSNSPVVSKVYYPGLADHPGHAIAAKQQKGFGAMLSFELKGGEAEVVAFLDALSLFSVAESLGGVESLVAVPATMTHRAMEPQARFEAGIKDTLLRLSVGIEDADDLVADIQAGLAAVAACQ

SEQ ID NO: 18597 - protein, 398 aa, Triticum aestivum
  unsure (1)..(398): unsure at all Xaa locations
RRSVPPLPYPSPPPAPASPPAPSPPPVPPRRGAAASAPLLHRGLDHPPAGRLPPPRRRLLRRPRRPPRRPPAPPRALALSPRLPPRTAWWTRVVRFVGYVPVAKRSRIVDLSRGFRQRGPDGSGVHSFVDXELAHHRLPKAKLTSDHHPLYNEGKTVVVTVNGEIYNHEELKAKLKSHQFQTGSDCEVIAHLYEECGGPLYMGWGLDGSVGLPAAREACCVAARRAIGICPLYMGWGLDGSVWFSSEMKALSDDCERFISFPPGHLYSSKTGGLRRWYNPPWFSESIPSAPYDPLLIRESFEKAVITRLMTDVPFGLLSSGGRVSALLASVLPRHLPATFAPSLWGYTLHSLCAGLLGAPVLYPAQAVAVSPGTARPPIVSNVSGKINSWGVKNGLFR

SEQ ID NO: 18598 - protein, 437 aa, Ferroplasma acidarmanus
MASNNYKNLPKIITDVPGPESKLLLQKQREMESSTVIYPDSFPIAIKRAENSLIEDLDGNIFIDWVSGISVLNLGFNDNIRKAVKNQVDDIWHALEIPTEVRINFLEALRNSFPPEMRNYKTIFGISGADACETAINIAHAIRKKNAPTIAFEGAYHGVSGGIIAATAGRKYREAVYSDGFKVIRVPYPYKLWYDYDVSDIISIMKKIMDDGEAGYDRPDSVIVEPVQGEGGYIVPPDGFLKAIREFCTEYDLTMIVDEVQSGVGRTGKMWAFEYENITPDIVCVSKSIGGGLPVSLVYYRDDYDKKLPKPFHLGTYRANPLAMAAGITVINEVPKYFDKVKSSGKEMLNKFNKIDSNLIGEVRGKGYMIGIELVDNGKPVNSKHMMELKHELLKNGLLMHTCGHYGNVFRFMGALNIEEELLNRGVEIFSKAVKIK

SEQ ID NO: 18599 - protein, 588 aa, Zea mays
  unsure (1)..(588): unsure at all Xaa locations
MCGILAVLGCSDCSQARRARILACSRRLKHRGPDWSGLYQHEGNFLAQQRLAIVSPLSGDQPLFNEDRTVVVVANGEIYNHKNVRKQFTGAHSFSTGSDCEVIIPLYEKYGENFVDMLDGVFAFVLYDTRDRTYVAARDAIGVNPLYIGWGSDGSVWMSSEMKALNEDCVRFEIFPPGHLYSSAAGAGFRRWYTPHWFQEQVPRTPYQPLVLREAFEKAVIKRLMTDVPFGVLLSGGLDSSLVASVTKRHLVKTDAAEKFGTELHSFVVGLEGSPDLKAAREVADYLGTTHHEFHFTVQDGIDAIEEVIYHDETYDVTTIRASTPMFLMARKIKSLGVKMVLSGEGSDELLGGYLYFHFAPNREELHRETCRKVKALHQYDCLRANKATSAWGXEVRVPFLDKEFVDVAMGMDPEWKMYDKNLGRIEKWVLRKAFDDEEHPYLPEHILYRQKEQFSDGVGYNWIDGLKAFTEQQVTDEMMNSAAQMFPYNTPVNKEAYYYRMIFERLFPQDSARETVPWGPSIACSTPAAIEWVEQWKASNDPSGRFISSHDSAATDRTXTSWRWSTATGTXANGTVNGNDVAVAIAV

SEQ ID NO: 18600 - protein, 138 aa, Shorea ovalis
EKNIPVLLGLLSLWNVSFLGYPARAILPYSQALEKFAPHIQQVSMESNGKGVSIDGVPLPYEAGEIDFGEPGTNGQHSFYQLIHQGRVIPCDFIGSAKSQQPIHLKGEVVSNHDELMSNFFAQPDALAFGKTPEQLHK

SEQ ID NO: 18601 - protein, 760 aa, Shewanella oneidensis MR-1
MIELNRRTFLKGAGASGATCALASLLPGSLAALESKQLKGMGKEIASICEMCSTRCPISARVIEGKNVFISGNKAAKSFGGKVCARGGAGHSLLYDPQRIVKPLKRVGERGEGKWAEISWDEAYQLIADNLTKIKQAHGPEAVAFSSKSGSQEKHLFHLATAFGSPNTFTHASTCPGGYEIAAKAMFGTKVKRDLSNSKYIINFGHNLYEGINMSETRGMMAAQMDKGAKLVVFEPRFSIVADKADEWYAIRPGTDVAVALALCHVLIEENLYDKAFVERYVEGFDAFAAEVKAYTPEWAETISDVPAKDIRRIVREYAAKAPHAVVDFGHRATFTTEEFEMRRALYAANILIGNIERKGGIYLGQKPGDYNKLAGEDVAPVLGKPGVKDMPKPAAKRIDQVEEQYAMMWSAGGIYQTVLDATLSAVPYQLHGWVMSRTNPMQTMTDRARVVEALKKLDFVAVCDVYISETAAYADVILPESTYLERDEEIADKSGKNPAYYVRQRVVETLSDTRPSWQIFKDIGHKLGLSEFYPWENMETLQLLQVNRDTELLRRIKDEGFVSFGKPIMLCEPKMVAEFTKAYANAKPADEDGTYGSLLSFKTPSGKIELTSAKVEAMAPGRGVIKFREVQLKKPNELYFIQGKVAVHTNGATHNVPMLANLMSDNAVWVHPVTAGKLGISNGDPIRLTSSVGTEEGHALVTPGIRPDTVFAYMGFGSKNKELVRATGKGIHCGNLLPHVTAPVCGMTVHTTGVTLAKR

SEQ ID NO: 18602 - protein, 311 aa, Bordetella bronchiseptica RB50
MKLAFVFPGQGSQSVGMLDAWAGNAAVADVVARASAALGQDLGALMAQGPAEQLNLTTNTQPAMLTAGAACFAAWRAAGGPMPEVMAGHSLGEYAALTAAGALALEDAVRLVRVRADAMQAAVPVGAGAMAAVLGLDDDAVRAACQQAAQGEVVEAVNFNAPAQVVIAGHKAAVERACEAAKAAGAKRALLLPVSAPFHSSLLKPAAEVLQGALAGVAVSAPQVPVLNNVDVATPAEPAAIRDALVRQAWHPVRWVETLRAMKELGVTHVIECGPGKVLTGLTKRIDADLTGIAITDPASLEAALAAVNGN

SEQ ID NO: 18603 - protein, 138 aa, Shorea ovalis
EKNIPVLLGLLSIWNVSFLGYPARAILPYSQALEKFAPHIQQVSMESNGKGVAIDGVPLPYEAGEIDFGEPGTNGQHSFYQLIHQGRVIPCDFIGSAKSQQPIHLKGEVVSNHDELMSNFFAQPDALAFGKTPEELHK

SEQ ID NO: 18604 - protein, 404 aa, Escherichia coli
GKKITLQNGKLNVPENPIIPYIEGDGIGVDVTPAMLKVVDAAVEKAYKGERKISWMEIYTGEKSTQVYGQDVWLPAETLDLIREYRVAIKGPLTTPVGGGIRSLNVALRQELDLYICLRPVRYYQGTPSPVKHPELTDMVIFRENSEDIYAGIEWKADSADAEKVIKFLREEMGVKKIRFPEHCGIGIKPCSEEGTKRLVRAAIEYAIANDRDSVTLVHKGNIMKFTEGAFKDWGYQLAREEFGGELIDGGPWLKVKNPNTGKEIVIKDVIADAFLQQILLRPAEYDVIACMNLNGDYISDALAAQVGGIGIAPGANIGDECALFEATHGTAPKYAGQDKVNPGSIILSAEMMLRHMGWTEAADLIVKGMEGAINAKTVTYDFERLMEGAKLLKCSEFGEAIIE

SEQ ID NO: 18605 - protein, 148 aa, Plantago major
MASRRILKELRELQRDPPTSCSAGPVAQDMFHWQATIIGPNDSPYAGGVFQVTIHFPTDYPFKPPKVAFRTKVFHPNINNNGNICLDILKDQWSPALTISKVLLSICSLLTDPNPDDPLVPEIAHIYKNDKPKYESMARNWTHKYAMC

SEQ ID NO: 18606 - protein, 350 aa, Xanthomonas campestris pv. campestris str. ATCC 33913
MDVAVPALPLHCTFEAADWQRLAQHWHAVALSSEVSEAPFKAMLLDEPLVLYRLGAELVAARDVCPHRGVPLSMGSADGAGVVCAYHGLRFGAGGRCNHIPASPNQNIPAKMRLHTYAVAERYGLIWVCLAKPAGVSAAEVQIPPMPGWDEDGFQQIVCPGFDIAGSAARQLEGFIDVAHFAFVHTATFAQPDKREVPAYTTTETPTGFNADYLSSVANYSVDMPLPDVDPGFQWLRHFEVHLPFTATLTIHFPVPGKRLVIMNAASPVSKHKTRLLVPIARNFDTHLPVEDVHAFNLRVFEEDRAMVEAQRPEYLPLDPLLEVHIPADRSSIAYRRGLRSQGYSDFFLR

SEQ ID NO: 18607 - protein, 426 aa, Triticum aestivum
MAMSRAAAAVGRRRCGPRLPAARSMASWFGHVEPAAKDPILGVTEAFLADPSPDKVNVGVGAYRDDDGKPVVLECVREAERRIAGSTNMEYLPMGGSVKMIEESLKLAYGEDSEFIKDKRIAAVQALSGTGACRLFADFQKRFLPDSQIYIPTPTWSNHHNIWRDAQVPQRTFAYYHPESRGLDFAGLMDDIKNAPEGSFFLLHACAHNPTGVDPSEEQWREISQQFKVKNHFPFFDMAYQGFASGDPERDAKAIRIFLEDGHQIGCAQSYAKNMGLYGQRAGCLSILCDDEIQAVDVKSQLQQIARPMYSNPPLHGALIVSTILGDPALKSLWLKEVKGMADRIIGMRKALKESLEKLGSPLSWEHITNQIGMFCYSGMTPEQVDRLTNEFHIYMTRNGRISMAGVTTGNVAYLANAIHEVTKPI

SEQ ID NO: 18608 - protein, 309 aa, Glycine max
NDLKDDTMIPIECFEEPWVIFRGKDGKPGCVQNTCAHRACPLHLGSVNEGRIQCPYHGWEYTTDGKCEKMPSTRLLNVKIKSLPCFETEGMIWVWPGNDPPTATLPSLLPPSGFEVHAEIVMELPIEHGLLLDNLLDLAHAPFTHTSTFAKGWSVPSLVNFLTPASGLQGYWDPYPIDMEFRPPCMVLSTIGISKPGKLEGQSTSQCATHLHQLHVCLPSSKQKTRLLYRMSLDFAPVLKHIPFMQHLWRYFAEQVLNEDLRLVLGQQERMNNGANVWNFPVSYDKLGIRYRLWRNALERGNKQPPFSK

SEQ ID NO: 18609 - protein, 427 aa, Bradyrhizobium japonicum USDA 110
MTAIIDIIGREILDSRGNPTVEVDVVLEDGALGRAAVPSGASTGAHEAVELRDGDKARYLGKGVTKAVGAVNGEIFEALSGLDVEQQAQIDQIMIDLDGTPNKSRLGANAILGVSLACAKAAANSLDMPLYRYVGGTSARLLPVPMMNIINGGVHADNPIDFQEFMILPVGASSFAEGLRYGAEVFHTLKSELKKAGHNTNVGDEGGFAPNLPSADAALEFVMNAIGKAGFKAGSDIVIGLDCASTEFFKDGKYVYEGEGKTRSISEQAKYLADLVARYPIVTIEDGMSEDDMDGWKELTDLIGKKCQLVGDDLFVTNVKRLAEGIKAGRANSILIKVNQIGTLTETLAAVEMAHKAGYTSVMSHRSGETEDSTIADLAVATNCGQIKTGSLARSDRTAKYNQLLRIEQQLGKQALYGGKAALKALA

SEQ ID NO: 18610 - protein, 216 aa, Chlamydomonas reinhardtii
MSHKPDDDYDYLFKVVLIGDSGVGKSNLLSRFTRNEFSLESKSTIGVEFATRSIQVDGKTIKAQIWDTAGQERYRAITSAYYRGAVGALLVYDITKSVTFENVERWLKELRDHADSNIVIMLVGNKSDLKHLRDVQTEVAQAFCEREGLSFIETSALESTNVEKAFQQILTEIYHIVSKKVLDSEDNRPKIGEGRDVIVIDNAHDDGGKKKGGCCS

SEQ ID NO: 18611 - protein, 1066 aa, Methylococcus capsulatus str. Bath
MQVTRRQFFRLSAATLGGSSLAVMGFSPREALAEVRQFKLARTTETRNTCPYCSVACGLIMYSLGDKAKNAKAEIIHIEGDPDHPVSRGSLCPKGAGLLDFVRSPSRLKYPEYRAPGSDAWKRVSWDWALERIARLLKEDRDRNFIARNEQGQTVNRWTSLGFLAASAGSNETGYLTNKIARALGIVMLDSQARICHAPSVSALASSFGRGAMTNTWMDIKNADVILVMGGNPAEAHPVGFKWAIEAKARNKARLIVVDPRFNRTAAVADFYAPIRAGTDIAFLNGVIRYLLEKDAINHEYVRAYTNASFIVREDFRFEDGLFSGYDAGKTEQHYDRSTWTYELDEHGYARIDPTLRHPRCVFQLLKTHVERYTPDKVTELTGTPTDAFLKICDLIASTAVPDRTLTSLYALGWTHHSVGVQNIRVMAMIQLLLGNIGVSGGGVNALRGHSNIQGLSDLGLLTDMLPGYITLPKDGETSRAVYLEKRTLKPLRPGQLSYWSNLPKFHTSLMKAWYGKAATRDNDYCYDWLPKLDKPYDSLRMFDLMAQGKVNGFICQGFNPLASYPDKGKIATALARLKFLVVMDPLATDTSVFWQNHGEYNPVNPADIQTEVFRLPTTCFAEEDGSLVNSSRWLQWHWKGAEPPGEARNDIEIMSALYLRLREMYEKESGAFPDPILNLHWPYQKPEEPTPEELAREYSGYAVADVADPKDPSKVLVKAGQQLAGFAQLQDDGSTACGNWIFSGAFTEAGNQMARRDTSDPTGLGIAPGWAWAWPANRRILYNRASCDPDGKPWNEKRPIIHWDGSRWTGLDVPDYKADVPPGSDMSPFIMNPEGVGRLFGADRLTDGPFPEHYEPYETPLDTNPLHPKVVSNPAARVFPGDKAMLGGKDDFPYVATTYRLTELFNTWTDHVRINASLQPEQFVEIGQELARELGIANGEIVTVRSRRGFIKAVAMVTKRIKPLTVAGQTVHQIGIPVHWGLQGQTRKGFFANNLTPYLGDANTQTPEYKAFLVKVEKDLSEPGPHTQKRGEAQEGRRRSGGNGTAGATEKSSWLTRVLKGRLEV

SEQ ID NO: 18612 - protein, 233 aa, Escherichia coli
ARSEKRVPMTRLRKRVAERLLEAKNSTAMLTTFNEVNMKPIMDLRKQYGEAFEKRHGIRLGFMSFYVKAVVEALKRYPEVNASIDGDDVVYHNYFDVSMAVSTPRGLVTPVLRDVDTLGMADIEKKIKELAVKGRDGKLTVEDLTGGNFTITNGGVFGSLMSTPIINPPQSAILGMHAIKDRPMAVNGQVEILPMMYLALSYDHRLIDGRESVGFLVTIKELLEDPTRLLLDV

SEQ ID NO: 18613 - protein, 348 aa, Listeria monocytogenes EGD-e
MKALKLYGKRDLRYEEADMPTIEEPDDVILKVKTVGICGSDISRYSKLGPYVPGMVWGHEFSGEVIEVGSEVTDIEIGDRAAGCPALYCGECEYCKKGEFARCRKLTVIGARHPGAYAEYIKLPAENVVKIPNELDYEAAALVEPSAVVVHGFYHTKLQAGDDVVVVGSGNIGLLAIQWAKVFGARRVIAIDVDDKKLALAKEVGADVVINSLKEDPLEVVAAHTDGLNADLVVEAAGSPITSAQVFAYAKKGGGVVFLGIPYADVTIERFYFEKIVRSELTVWGSWNAISAPFPGKEWQTTIHFLANKQINIEPMITHRLSLAEGPEVFERIYERNEFFGKVLFFPE

SEQ ID NO: 18614 - protein, 167 aa, Helianthus annuus
MATQSKKTLYDFTVKDAKGNDVDLSVYKGKVVLIVNVASKCGLTNNSYDELNQIYLKYKEKGFEILAFPCNQFGQQEPGTNEEIVDFVCTKFKSEFPIFDKIDVNGENAAPVYEFLKTGFYGILGGDIQWNFSKFLVDKNGQPVDCYYPTTSPLTVERDIQKLLGLL

SEQ ID NO: 18615 - protein, 437 aa, Corynebacterium efficiens YS-314
MTTKKRNTSETTDTAPKAVGADQAARPVRRTTRRIFDQSEKMKDVLYEIRGPVAAEAERMELDGHNILKLNTGNPAVFGFDAPDVIMRDMIAALPTSQGYSTSKGIIPARRAVVTRYEVIPDFPNFDVDDVFLGNGVSELITMTMQALLNDGDEVLIPAPDYPLWTAATSLSGGKPVHYLCDEDNEWNPSIEDIRSKITEKTKAIVVINPNNPTGAVYSRKVLQEIADIAREYDLLVLADEIYDRILYDDAQHINMATLCPDLMCITYNGLSKAYRVAGYRAGWMIITGPKRYAKGFIDGLELLAGTRLCPNVPAQHGIQVALGGRQSIYGLTGEGGRLLNQRNVAWQKLNEIPGVSCYKPMGALYAFPRLDPNVYEIHDDTQLMLDILRSEKILLVQGTGFNWPHHDHFRVVTLPWASQLENAIERLGNFLVSYKQ

SEQ ID NO: 18616 - protein, 387 aa, Oryza sativa (japonica cultivar-group)
MGTRELLVVLAVVVMAAVGAGAQSSSASPAPATSQAPTVRQQTPFGRTMSTVITVSISVFFFLLFFCAYINQCRLAEAGDARAAAAAAAGGGAGGGPSRRGKRGLDPAVVATFPIVPYREVVKHKIGKSVLECAVCLTSFDDGDDLRLLPHCSHAFHPECIDPWLESRVTCPLCRANLEKPPPPPPPPPAAAAASPSPERSPRCQPSPPPPPPPHALVIPVEDEEDDSDEDDRKEEAVELEMLRSERRAARLPRSHSTGHSLVASAAAAAESGDHERFTLRLPQHVRDEVLRSLRLRHAASLVNLSDMSSEGSSRGGRRALGLAFGNGGGSSHGGRRWQAFLARTVSWARGGGDGSVRRGWDGSTRRGKDDAESSRKGATSPAAGRP

SEQ ID NO: 18617 - protein, 153 aa, Glycine max
  unsure (1)..(153): unsure at all Xaa locations
RVSYVGPPPRIPLFVDSNEHTHGKWNYXWYVHKLLLXAVYGFIMFIYHSGWKETLPGELIDGIITRSKIAFYKYVXIMFIFNAIATLACGLAGTGAAFAFWLYRVTVVFYHAFYLPFLYTTFLADFFQEENFHLENVYYSEMKDAGFFDTDWE

SEQ ID NO: 18618 - protein, 610 aa, Pseudomonas chlororaphis
MCGLTGWVDYTRRLEGEDPAIRAMTNTLALRGPDAEGIWKHRHALLGHRRLAVIDLSGGTQPMVYRFADGQEVSLVYTGEVYNHDALRDQLRQAGHVFQTRSDTEVVLHAYLEWGERCCDHLTGMFAFALFDGRDGHLLLVRDRLGIKPLFYARHREGLLFGSETKAILAHPEFTTGLEVTGLVDVLTLSKGTAQTPFRNLMELLPGHFLSWRPNGQMKIQSYWKVRRQEHQHDLQTTVQQTRELVTHALGSQLHADVPVCSLLSGGLDSTTLTAIAQRIVKAKTGGNINSFSVDFTGQAEQFKSDDLRPDQDQPFALLAAEFIGSRHQTVLIDNEELVSYLAREEVFRARELPFTFGDMDTSLNLLFREIRKHSTVAISGEGADEVFGGYGWFRDPKVIASASFPWSSRVKLPAGFINADFNRQCDLAQYQQASYDDALLQVEHLAQDSPHERRMRELCHMHLKRWMVMLLDRKDRLSMCNSLEVRVPFTDHELVEYIYNVPWSIKSKDGEEKWLLKQACADFVPEAVLKRRKSPYPTSADLGYERFLRQSARQLLQDTGNPVFGIVSHAYMAEELRQPEGYFNTQISRHSLETALALDAWLRLHKISL

SEQ ID NO: 18619 - protein, 492 aa, Capsicum annuum
MDLSKYRPSSAYDSPFLTTNAGGPVYNNVSSLTVGPRGPVLLEDYHLIEKLATFDRERIPERVVHARGASAKGFFEVTHDISHLTCADFLRAPGVQTPVICRFSTVVHTRGSPESIRDILGFAVKFYTREGNFDLVGNNVPVFFNRDTKSFPDTIRALKPNPKSHIQENWRILDFFSFLPESLHTFAFFYDDVCLPTDYRHMEGFGVHAYQLINKAGKAHYVKFHWKPTCGVKSMTEEEAIRVGGTNHSHATKDLYDSIAAGNYPEWKLFIQIMNPEDVDKFDFDPLDVTKTWPEDILPLMPVGRLVLNRNIDNFFAENEQLAFNPGHIVPGVYYSEDKLLQTRIFAYADTQRHRIGPNYMQLPVNAPKCAHHNNHRDGAMNFMHRDEEVDYLPSRFDPCRPAEQYPIPSCVLTGRREKCVIPKENNFKQAGERYRSWAPDRQDRYINKWVESLSDPRVTHEIRSIWISYLSQADKSCGQKVASRLTVKPTM

SEQ ID NO: 18620 - protein, 138 aa, Shorea beccariana
EKNIPVLLGLLSIWNVSFLGYPARTILPYSQALEKFAPHIQQVSMESNGKGVSIDGVPLPYEAGEIDFGEPGTNGQHSFYQLIHQGRVIPCDFIGSAKSQQPIHLKGEVVSNHDELMSNFFAQPDALAFGKTPEELHK

SEQ ID NO: 18621 - protein, 404 aa, Escherichia coli
GKKITLQNGKLNVPENPIIPYIEGDGIGVDVTPAMLKVVDAAVEKAYKGERKISWMEIYTGEKSTQVYGQDVWLPAETLDLIREYRVAIKGPLTTPVGGGIRSLNVALRQELDLYICLRPVRYYQGTPSPVKHPELTDMVIFRENSEDIYAGIEWKADSADAGKVIKFLREEMGVKKIRFPEHCGIGIKPCSEEGTKRLVRAAIEYAIANDRDSVTLVHKGNIMKFTEGAFKDWGYQLAREEFGGELIDGGPWLKVKNPNTGKEIVIKDVIADAFLQQILLRPAEYDVIACMNLNGDYISDALAAQVGGIGIAPGANIGDECALFEATHGTAPKYAGQDKVNPGSIILSAEMMLRHMGWTEAADLIVKGMEGAINAKTVTYDFERLMEGAKLLKCSEFGDAIIK

SEQ ID NO: 18622 - protein, 694 aa, Mycobacterium tuberculosis CDC1551
MSLVIATPQLLATAALDLASIGSQVSAANAAAAMPTTEVVAAAADEVSAAIAGLFGAHARQYQALSVQVAAFHEQFVQALTAAAGRYASTEAAVERSLLGAVNAPTEALLGRPLIGNGADGTAPGQPGAAGGLLFGNGGNGAAGGFGQTGGSGGAAGLIGNGGNGGAGGTGAAGGAGGNGGWLWGNGGNGGVGGTSVAAGIGGAGGNGGNAGLFGHGGAGGTGGAGLAGANGVNPTPGPAASTGDSPADVSGIGDQTGGDGGTGGHGTAGTPTGGTGGDGATATAGSGKATGGAGGDGGTAAAGGGGGNGGDGGVAQGDIASAFGGDGGNGSDGVAAGSGGGSGGAGGGAFVHIATATSTGGSGGFGGNGAASAASGADGGAGGAGGNGGAGGLLFGDGGNGGAGGAGGIGGDGATGGPGGSGGNAGIARFDSPDPEAEPDVVGGKGGDGGKGGSGLGVGGAGGTGGAGGNGGAGGLLFGNGGNGGNAGAGGDGGAGVAGGVGGNGGGGGTATFHEDPVAGVWAVGGVGGDGGSGGSSLGVGGVGGAGGVGGKGGASGMLIGNGGNGGSGGVGGAGGVGGAGGDGGNGGSGGNASTFGDENSIGGAGGTGGNGGNGANGGNGGAGGIAGGAGGSGGFLSGAAGVSGADGIGGAGGAGGAGGAGGSGGEAGAGGLTNGPGSPGVSGTEGMAGAPG

SEQ ID NO: 18623 - protein, 1665 aa, Mycobacterium tuberculosis CDC1551
MGRCEMSYVIATPEMMATAAFDLARIGSQVSAASAVAAMPTTEVVAAGADEVSAGIAALFSAHAQEYQALSAQAAAFHDQFVHTLTAAARWYTATEIANAAAMRVVLGAVNAPTQTLLGRPLIGDGAHGTAPGQPGGAGGLLFGNGGNGAAGAVGQVGGAGGAAGLFGIGGAGGAGGAGAPGGTGGTGGWLAGGGGVGGMGGAGGGAGGAGGNAGLFGNGGAGGAGGAGGGAGGAGGNAGWFGHGGAGGVGGVGAAGANGATPGQDGAAGVAGSDDGAGGDGLAGSDGGDGGAGGVGGNGGRGGWLLGNGGAGGVGGVGGAGGAGAAGGAGGAGATGINGPAGISAAGGDGGAGGNGGAGGNGGVGGAGGAGGSAGLLGYVGRAGDGGAGGGGGLGGAPGDGGAGGNGGSWLAAGDGGAGGHGGDPGLGGAGGAGGASGGAGARAGANGLAAGNDGPVSGGNGGKGGNGAHAPVAGGHGGNGGAGGNGGLVGDGGAGGHGGDGAAGAGYADMTAIFLGSSGTPGEDGGNGGAGGAGGAGGAHAGDGGAGGAGGNGGAGGAGGNGAHGFNAVLVSDGGNGGDGGAGGRGGDGGAGGAGGDAPAGRAGSQGVGGDGGAGGAGGAPGNGGSGGRGDMAFKDGDGGAGGDGGDPGAGGKGGAGGAGATEGVTGATGATVHSGGNGGKGGNGADATVAGANGGKGGAGGNGGLVGDGGAGGDGGSGAAGANGANVGEDGADGTLSGQPGEGSEANGGQGGVGGGGAGGAGGDGGAGSSALGSGGNGGRGDAGQAGGAGGAGGAGGAGGSVSGDGGPGGKGGAGGAGGAGASGGGGGKGASGADSAEAVGGAGGKGGDGGVGGVGGDGGPGGDGGAGGAAPAGQVGSHGVGGVGGDGGLGGAGGNGGDGGHGSDGGDGGDGGDPGAGGLGGLGGDSGNGTRAASGVDASDHGPGSGGNGGNGGNGAQASVAGGAGGNGGDGGNAGRVGDGGAGGNGGDGAAGANGANSGAPGSDALALGQPGGNGGQGDAGQAGGAGGAGGAGGAGGSVSGDGGAGGNGGAGGNGGVGASGGAGARGANGIDSIGGTGGAGGGGGDGGAGGVGGHGGDGGVGGAAPSGTVGSHGTGGVGGDGGLGGAGGVGGAGGNGGIGITVGGAGGAGGNGGDPGAGGRGGLGGDSGNGTSAANGVDASKHGPLTGGDGGVGGNGAKAAAAGGDGGQGGDGGNAGLFGDGGAGGDGADGTAAEALGGDGGAGGAGGKGGDAGDIGDGGDGGKGGDGAHGALGGLTVAGGNGGAGGAGGAGGAGGAFLGDGGNGGAGGQGGAGRGGSPGGGGGVGGHGGAGGDAGMNGGGGTGGQGGNGAAGGAGWSPDSDLKGFDGFDGGSGGAGGDGGAGGAGGTQTGDGGDGGAGGLGGAGGVGGNGVDGFDINETTGRDGGDGGDGGYGGWGGAGGNGGAGGSAPAGEVGNRGVGGDGGDGGSGGDAGNGGLGGDGFTYLADFDGEPGGDGGDGGDGGWGRPGGQGGFGSTSGAHGKAGFGAPGGDGGDGGNGGHGGDGNGSFADAGDGGPGGNGGNGGLGGAGRDGGAPGGDGGDGGTGGSGGFGAPPPRSIGGGDGGDGGRGGDGGRGAGGLTSGGVGSSGESGGSGNGRGDPGSGGSGGEGGEGGPSISVNVT

SEQ ID NO: 18624 - protein, 532 aa, Schizosaccharomyces pombe
NKLLFNRFASSQSKDSNISEMNSKDSNTVPVYTTNTGCPIFNPMAAARVGKGGPVLLQDSHLIDVFQHFDRERIPERVVHAKGSGAFGEFECTDDITKYTKHTMFSKVGKKTPMVARFSTVGGERGTPDTARDPRGFALKFYTDEGIFDMVGNNTPVFFLRDPAKFPLFIHTQKRNPQNDMKDATMFWDYLSQNAESIHQVMILFSDLGGTPYSYRFMDGFSSHTYKFVNDKGEFYYCKWHFITNQGTKGLTNEEAAALDGSNPDHARQDLFEAIERGDYPSWTLYVQVMTPQEAEKYRYNIFDLTKVWPHKDVPMQRVGRFTLNQNPTNFFADIEQAGFSPSHMVPGIEVSADPVLQVRTFSYPDTHRHRLGANFEQIPVNSPKCPVFNYSRDGPMNVNGNQGNWPNYPSSIRPLAKVQYEPDEGHEKWVGQVTYHMDEITDVDFEQPRAFWQNVLGKKPGQQDNFVKNVAGHLSGAISPVRERQYGVFTRVDSELGRRIREATEAEVKKMEEKAPKPINKGEPHMFQGSS

SEQ ID NO: 18625 - protein, 339 aa, Synechococcus sp. PCC 7942
MIRIRNRWFRWLAIALASLVASIGIATVGFAATGVTPDQVLSAIEGTFGVNVGQRRNHIKGTCAVGNFVATTEAKTYSRSPLFSGQSIPVVARFSLAGGNPKAPDTAKNPRGLGLQFQLPNNRFLNMALLNTPVFGVASPEGFYENILAIRPDPTTGKPDPEKVKAFREKYPENKAQAAFLASNNPPTSYANTSYFGLHAFKFINQTNQTRLVRWQFVPQDGEKRLTDAELQAAPANFLEQKLIERTQDSPVKWDFWITLGQPGDAEDNPTIAWPSDRQQVKVGTLTLTAASPQPGAACEGINYDPLVLSDGIEPTNDPVLQFRSGVYALSYSKRTRGL

SEQ ID NO: 18626 - protein, 188 aa, Arabidopsis thaliana
MALEKHIEKVLFSDEVIAHRVNQLGIDITSDFSGDSEETPIFVGVATGACLFLADLVRRIDLPIAIDFIRAESYGSGTVSSGVPRVSFDLKLDITNKHVVLVEDIVDTGNTLSCLIEHMKAKKASSVSVCTLLDKPSRRKVHYKLVGKGKFYSGFECPDEFVVGYGMDFAEQYRNLSYTGVLKPEYYM

SEQ ID NO: 18627 - protein, 521 aa, Arabidopsis thaliana
MDSCCNFSLGTKTVLAKDSFKNVENKFLGEKIKGSVLKPFSSDLSSKKFRNRKLRPGVAYAIATSKNAKEALKNQPSMFERRRADPKNVAAIILGGGDGAKLFPLTKRAATPAVPVGGCYRMIDIPMSNCINSCINKIFVLTQFNSASLNRHLARTYFGNGINFGDGFVEVLAATQTPGEAGKKWFQGTADAVRKFLWVFEDAKNRNIENIIILSGDHLYRMNYMDFVQHHVDSKADITLSCAPVDESRASEYGLVNIDRSGRVVHFSEKPTGIDLKSMQTDTTMHGLSHQEAAKSPYIASMGVYCFKTEALLKLLTWRYPSSNDFGSEIIPAAIKDHNVQGYIYRDYWEDIGTIKSFYEANIALVEEHPKFEFYDQNTPFYTSPRFLPPTKTEKCRIVNSVISHGCFLGECSIQRSIIGERSRLDYGVELQDTLMLGADSYQTESEIASLLAEGNVPIGIGRDTKIRKCIIDKNAKIGKNVVIMNKDDVKEADRPEEGFYIRSGITVVVEKATIKDGTVI

SEQ ID NO: 18628 - protein, 417 aa, Oryza sativa
MFPPGLIHHRPDGGEAGRAAGGGPSLVLTADPKPRLRWTADLHERFVDAVAQLGGPERIDPFRDTNVIGAVGDGANVIGAIMLDYSVNDVGTAKRVYSWKATPKTILRTMGVKGLTLFHLKSHLQKYRLGKQSGKEASEQSKDASYLLDAQGGMSVSPRVSTQDVKENQEVKEALRAQMEMQRRLHEQVEVQKHVQIRMEAYQKYIDTLLEKACKIVSEQLASSGFSISDNDLPELSGGVMCGSADTLSSSIFHQLSVSPINLHSPEGKPTPSGIEGQMILQKSPELKRNLALPSPPFVQPCVAPAPVVIVAQGSRRRDRQVVADLVRPSVVALGHRSTAVVVKPKVAAASSSPPSPSVDLPPPFWSPVSSPRRPQPVGAVRSRRRAVVRRRACAARAVVGDDVTADVIVAVSRGPP

SEQ ID NO: 18629 - protein, 146 aa, Glycine max
MASEDDAVKKAMIVDARARNISHNVRCTECGSQSIEDSQADIAILLRKLIRDEIQSGKTDKDIYKKLEDEFGETVLYTPKFDMQTAALWLLPLLIAGSAAGVWAYNRHKQKTNVHIMALNLVRGVPLTPKKKKKSNVPTLEGGARY

SEQ ID NO: 18630 - protein, 280 aa, Rhodopseudomonas palustris CGA009
MFAMTSSAQSPLQQLGGTVVLAGAGKMGGALLTGWLAQGLDGGDVVVIEPHPTEEIAALSARGVRLNASAGDVGAVSTLVVAVKPQMFAEAAAALRGYVGPSTLVVSIMAGKPIAALSEQLGGHVVRAMPNTPAAIGRGITVAVAAGNVTAAQRGIADALLRATGGVEWVDDEALIDAVTAVSGSGPAYVFLLAEELARAGVEAGLPEGLAMTLARATVAGSGELLHRSDLDAATLRKNVTSPGGTTAAALEVLMANDGFRPLLTRAVAAATKRSKELAK

SEQ ID NO: 18631 - protein, 590 aa, Rhodopseudomonas palustris CGA009
MGSEFSIDQKRYLEGFATGVTAARAARGSLPAGSAASPSGPDAIHHQAQDRVTASGKKLNDQEKWKREQHPFDAYARLKQQAKDNAAPKPADNFRWRYYGLFYVAPAQTSYMCRLRIPNGILTSWQMAGLAYLADTLADGYAHVTTRANLQMREIAPKDAVQLLQGIESLGLWARGSGADNIRNVTGSATAGIDPQELIDTRAYARDWHFYILNERALFGLPRKFNVAFDGGGLIPTLEDTNDIAFQAVTIGDGHGVAPGVYFRLALGGITGHKDFARDTGVIVAPDEATEVADAIVRVFIEHGDRTDRNKARLKYVLDAFGFDKYLELVEDKLGRKLIRVPAEAAAPRPAQDRAAHLGVHPQQQAGMNWIGVRLATGHLTSVQMRGLAEIARSFGDGDLRLTVWQNLLISGVPDARVTDATAAIEALGLAITASPLRAGLIACTGASGCRFAAAHTKETAEAIAQYCEPRVPLDTPINIHLTGCHNSCAQHFISDIGLIGAKVAVSDEDSVEGFHIHVGGGFGVDAAIGTEVLRDVKQDDAPRVIERMLQTYLARRASPAETFLAFVRRQDAAALQQLFAYEQSPETVA

SEQ ID NO: 18632 - protein, 357 aa, Picea abies
MGSLESEKTVTGYAARDSSGHLSPYTYTLRNKGPEDVIVRVIYCGICHSDLVQMHNEMGMSNYPMVPGHEVVGVVTEIGSEVKKFKVGEHVGVGCIVGSCRSCSNCNGSMEQYCSKRIWTYNDVNHDGTPTQGGFASSMVVDQMFVVRIPENLPLEQAAPLLCAGVTVYSPMKHFGMTEPGKKCGILGLGGVGHMGVKIAKAFGLHVTVISSSDKKKEEALEVLGADAYLVSKDAEKMQEAAESLDYIMDTIPVAHPLEPYLALLKTNGKLVMLGVVPEPLHFVTPLLILGRRSIAGSFIGSMEETQETLDFCAEKKVSSMIEVVGLDYINTAMERLVKNDVRYRFVVDVARSNLDK

SEQ ID NO: 18633 - protein, 159 aa, Plantago major
MLQRIGIGLVLSLVSIVYAAIIERKRLATAMEYGLVDMPKAVVPMSALWLAPQYVLSGVADVFTMIGLQEFFYDQIPCDLKSIGLAMYLSILGIGSLLSSFLVSFIQNMTKGHGQDGWFADNLNKAHLDYFYWLLAGLSTVGLSAYIYFARSYVYRRKV

SEQ ID NO: 18634 - protein, 83 aa, Cucumis sativus
ERVVHARGASAKGFLRVTHDITNLSCADFLRAPGVQTPVIVRFSTVIHERGSPETLRDPRGFAVKFYTREVRILVVYAFIGCT

SEQ ID NO: 18635 - protein, 393 aa, Mycobacterium tuberculosis CDC1551
  unsure (1)..(393): unsure at all Xaa locations
MSGEDSIRSFPVPDLGEGLQEVTVTCWSVAVGDDVEINQTLCSVETAKAEVEIPSPYAGRIVELGGAEGDVLKVGAELVRIDTGPTAVAQXNGEGAVPTLVGYGADAAIETSRRTSRPLAAPVVRKLAKELAVDLAALQRGSGAGGVITRADVLAAARGGVGAGPDVRPVHGVHARMAEKMTLSHKEIPTAKASVEVICAELLRLRDRFVSAAPEITPFALTLRLLVIALKHNVILNSTWVDSGEGPQVHVHRGVHLGFGAATERGLLVPVVTDAQDKNTRELASRVAELITGAREGTLTPAELRGSTFTVSNFGALGVDDGVPVINHPEAAILGLGAIKPRPVVVGGEVVARPTMTLTCVFDHRVVDGAQVAQFMCELRDLIESPETALLDL

SEQ ID NO: 18636 - protein, 540 aa, Lycopersicon esculentum
MAVSSYARAFPSFECRSEPDFSGSLPHPKAGVRFSGKYNSGSNRSQVYGLSSLIYRFPPNFVRQLSIKARRNCSNIGVAQVVAASWSNNQAGPEFTPAANAVDSSASAAVTSIGITTGDEEVAVVENADCSDQNVQIKGSTGVKYASFLNSDGSVAIHAGERLGRGIVTDAITTPVVNTSAYFFNKTSDLIDFKEKRRASFEYGRYGNPTTVVLEEKISALEGAESTLIVASGMCASTVMFLALVPAGGHIVTTTDCYRKTRVFIETILPKMGITATVIDPADMGALELALNQKKVDLFFTESPTNPFLRCVDIELVSKLCREKGALVCIDGTFATPLNQKALALGADLVVHSATKFLGGHNDVLAGCISGPEKLVSVIRNLHHILGGALNPNAAYLIIRGMKTLHLRVQQQNSTALRMAEILEAHPKVKHVYYPGLPSHPEYHLAKKQMTGFGGVVSFEVDGDLLTTAKFVDALRIPYIAPSFGGCESIVDQPAIMSYWDLSQSDRAKYGILDNLVRFSFGVEDFEDVKADVLQALDSI

SEQ ID NO: 18637 - protein, 174 aa, Arabidopsis thaliana
MAYEKVNELNLKDTELCLGLPGRTEKIKEEQEVSCVKSNNKRLFEETRDEEESTPPTKTQIVGWPPVRSSRKNNNSVSYVKVSMDGAPYLRKIDLKTYKNYPELLKALENMFKVMIGEYCEREGYKGSGFVPTYEDKDGDWMLVGDVPWDMFSSSCKRLRIMKGSDAPALDSSL

SEQ ID NO: 18638 - protein, 462 aa, Burkholderia vietnamiensis
MSHSGLTRTAAAPPSLSRHAVDTARLAAPLAIAQLSQMAMSVTDTVLLGSLGPDSLAAGGLGANFFFVIVTVLQGVLSSVSVSVAHARGAQAEHRVPHIYWTGFVLSVLLAIPAVVALSLSEPLLLMFHEPPTLAQHVGEYTGILRFAALGSLIGVGLMRAFLPAIGAARRLLWVSIGGIGVNAVLNYGLIHGAYGLPRLGFLGSAVATTITIWLTAFALIWLLHGRARFRHFVSAARPKLPMMGELIGIGWPVAITYGVESTLFLATGLTVGVLGATALAAHQIALNVASVAFMVPLAIGQAANVRVGYWIGAGDPVAARHAGFVALGLGVAFMSLSGLVLILAPHAIVGLYLHLDDPANAATVSLAASLLGIAAVFQIVDGMQTVGSGALRGLRDTRIPMLAATFGYWGIGFPTGYWLAFHAGLGARGLWWGLAAGLASVAVLMAWRFHLKTSSLIAAPR

SEQ ID NO: 18639 - protein, 413 aa, Kluyvera cryocrescens
MAESSPERRFTRIDRLPPYVFNITAELKMAARRRGEDIIDFSMGNPDGATPPHIVEKLCTVAQRPDTHGYSTSRGIPRLRRAISRWYQDRYDVEIDPESEAIVTIGSKEGLAHLMLATLDHGDTVLVPNPSYPIHIYGAVIAGAQVRSVPLVQGVDFFNELERAIRESYPKPKMMILGFPSNPTAQCVELEFFEKVVALAKRYDVLVVHDLAYADIVYDGWKAPSIMQVPGARDVAVEFFTLSKSYNMAGWRIGFMVGNKTLVNALARIKSYHDYGTFTPLQVAAIAALEGDQQCVRDIAEQYKRRRDVLVKGLHEAGWMVELPKASMYVWAKIPDKYAAMGSLEFAKKLLQDAKVCVSPGIGFGEYGDTHVRFALIENRDRIRQAIRGIKAMFRADGLLPSEHKSRIDFCVA

SEQ ID NO: 18640 - protein, 189 aa, Arabidopsis thaliana
MDEFVNLKETELRLGLPGTDNVCEAKERVSCCNNNNKRVLSTDTEKEIESSSRKTETSPPRKAQIVGWPPVRSYRKNNIQSKKNESEHEGQGIYVKVSMDGAPYLRKIDLSCYKGYSELLKALEVMFKFSVGEYFERDGYKGSDFVPTYEDKDGDWMLIGDVPWEMFICTCKRLRIMKGSEAKGLGCGV

SEQ ID NO: 18641 - protein, 612 aa, Bradyrhizobium japonicum USDA 110
MCGIAGIVNLRGSAVEPDDISRLTGLIAHRGPFGQGTWFSADRSLAFGHRRLAIIDPGEGGYQPMRSADGRHVIVFNGEIYNFLELRRELEAQGVVFRSQSDTEVILAAWQAWREDMLPRFNGMWALAIFDTATGELFLARDRFGIKPLLYAVSPERFIFASEQRALVRSGLIDASVDVEVARRLLLDAFGIEGSERTLFRQVRRLQGGHCMWLRQGKVSVRRWWRTVDHLPPVPGTEAEQVARFRELFQDAVALRMRSDVPIGTCLSGGFDSSAVICTMAAHEKAGMGPRDSTAWRHAFVATFPGALNDERPMAEEAAAWAEVAPTFLEIGQADALIDLDQILDDLDDVYIALPSAIWLIYRQLRRQDVTVSLDGHGADELMGGYLQQGQALAFRIRNAAEDFASRSALARRSVDVLRMLALKRRGVYFLRGGLRDLPASLPLVAEDDVLPREWGGLNRRLYRMFHSTVLPTILRNFDRLSMAHGVEVRMPFMDWRLVTYTMALPESSKSSEGYTKAVARRAMANLMPESIRTARRKVGFNSPMPEWLNGPLAGWTADLLDRKVPAFAELVDEAALRTTVSRLTASKSWDWEAVGRIWPYLNMKWMLARYA

SEQ ID NO: 18642 - protein, 464 aa, Glycine max
MFGVVRRRVASGSPSPWLLGQSAQKIRSGPSVSARASSIVEKEIVFRSGGCGFVQNFSHITPGSWINSKPMRVVIHPEATVRTWGRLFSSESGDTVDVVVPPLAESISDGTLAQFLKRPGDRVNADEPIAQIETDKVTIDVSSPESGVILKLLANEGDTVEPGNKIAIISRSADATHVAPSETISEKAAPQPTQKVSEEKKAPKVETAPAKEKPKTPPATLKSPTEPQLPPKERERRVPMTRLRKRVATRLKDSQNTFAMLTTFNEVDMTNLMKLRSDYKDAFVEKHGVKLGLMSGFVKAAVNALQHQPIVNAVIDGDDIIYRDYIDISIAVGTSKGLVVPVIRNADTMNFADIEKQINAFAKKANDGTLSIDEMAGGTLTISNGGVYGSLLSTPIINPPQSAILGMHSIVSRPTVVGGNIVPRPLMYVALTYDHRIIDGREAVFFLRRIKDIVEDPRRLLLDI

SEQ ID NO: 18643 - protein, 302 aa, Pseudomonas chlororaphis
MPAQGRPAVPRFGLRQARGLPAAQLADRPGNRPGPGPGRGLRPSPFGPGRKRPGAAGPAGRKLMDRQITASTCCYCGVGCGVLIEHDGERILGVSGDPAHPANFGKLCSKGSTLHLTGDLAARALYPELRLGKGLARARSDWDSALDHAASVFAETIAEHGPDSVAFYISGQLLTEDYYAFNKLARALVGTNNIDSNSRLCMSSAVVGYKRSLGADAPPCSYEDLELSDCVMIVGSNMAYAHPILFRRLEEAKSRRPQMKIIVIDPRRTDTCDLADLHLAILPGTDVALFHGILHLLLWEDW

SEQ ID NO: 18644 - protein, 425 aa, Methanothermobacter thermautotrophicus str. Delta H
MDISRPRGTRDFLFAEMRNRKEVEGVLRRTFETYGYHEIKTPIFEELKLFTVKSGEEVVNQIYHFTDKGGRELALRPELTAPVARLYMNEMQKKPKPIKMYYFGSCFRYERPQAGRFRQFWQFGCELIGGRSPLAEAEVISLASESLHELGLDGFEVHIGHLGILRGILGREEIPSELQDRIMGVIDKGDVEELEALLGEVEVSGESRELLMKLIGTQGGPEVLDDVEEYLGGYSESLEALEEFRELVETLHYFGVDDYHVNLGIARGLDYYTGIVFEIYVPELGAQKQICGGGTYNLVETFGGERVESTGFAFGFDRLMNALGMDEENMRMVDVFVIPIQDSTVPEAIRITQELRAAGVSADLEVSGRKLRKALSHADNLGARFAVLTGEREIQDGKVTVKDMERNSQETLPRDEMVDKIKGRC

SEQ ID NO: 18645 - protein, 292 aa, Zymomonas mobilis
MKPVRKAIFPVAGQGTRFLPATKAMPKEMLPVVDRPLIQYAVDEARAAGIEELIFVTGRGKQAIEDYFDIAYELEASLTAKGKTGMLDLLEGTRVAPGRACFIRQQEPLGLGHAVWCARDLIGDEPFAVLLPDELLWNPKRPSLVQLVETYNQKGGNVVTVMEVPEEHTHRYGIVDPGKTDGEVTEVKGLVEKPEKAPSRLAMTGRYILQPDIMPLLAQDNRGVGGEIQLTDSMAQLIGKQPFHACRFGGIRHDCGDKAGFIQANVALALERPDIGLRLETIYIAKIFNLMD

SEQ ID NO: 18646 - protein, 589 aa, Zea mays
  unsure (1)..(589): unsure at all Xaa locations
MCGILAVLGCSDWSQAKRARILACSRRLKHRGPDWSGLYQHEGNFLAQQRLAVVSPLSGDQPLFNEDRTVVVVANGEIYNHKNVRKQFTGTHNFSTGSDCEVIIPLYEKYGENFVDMLDGVFAFVLYDTRDRTYVAARDAIGVNPLYIGWGSDGSVWIASEMKALNEDCVRFEIFPPGHLYSSAGGGFRRWYTPHWFQEQVPRTPYQPLVLREAFEKAVIKRLMTDVPFGVLLSGGLDSSLVASVTKRHLVETEAAEKFGTELHSFVVGLEGSPDLKAAREVADYLGTIHHEFHFTVQDGIDAIEEVIYHDETYDVTTIRASTPMFLMARKIKSLGVKMVLSGEGSDELLGGYLYFHFAPNKEELHRETCRKVKALHQYDCLRANKATSAWGLEVRVPFLDKEFINVAMGMDPEWKMYDKNLGRIEKWVMRKAFDDDEHPYHPQHILYRQKEQFSDGVGYNWIDGLKSFTEQQVTDEMMNNAAQMFPYNTPVNKEAYYYRMIFERLFPQDSARETVPWGPSIACSTPAAIEWVEQWKASNDPSGRFISSHDSTAIDHTXAVSRRWPTAAATXAANGTVNGKDVAVAIAV

SEQ ID NO: 18647 - protein, 352 aa, Rhodopseudomonas palustris CGA009
MVAMSSFANKSEHQKVAEAEIESFRNELGPFVVAAETTRMAMLFADAERSNCPIIFANDSLLSLTGYDRDEVLGRSLAFMLVHDADRETLAQLAGKFGGTSDKGVEFLCRRKDDSEFWAAVFISPVRDEAGTVIQYFASFVDLTKHKEDEARSKMLIDELNHRVKNVLATVQAIVWQALRTSSDPKTIQQAIESRLVALSRSHDLLTRENWESAGLHDIIANALEPFERADGLSGRIFIAGDNVRFPPKAALALGIVFNELATNAVKYGALSTDNGALHIDWKTVSSPEGQRVLLQWREAGGPVVAAPSRRGFGSRVIDRVLAHELAGEVRMDFLADGLICSCSLLVPKDAG

SEQ ID NO: 18648 - protein, 447 aa, Bacteroides thetaiotaomicron VPI-5482
MKYQVIIIGGGPAGYTAAEAAGKAGLSVLLIEKNNLGGVCLNEGCIPTKTLLYSAKTYDSARHSSKYAVNVSEVSFDLPKIIARKSKVVRKLVLGVKAKLTSNNVAMVTGEAQIIDKNTVRCGEETYNAENLILCTGSETFIPPITGVETVNYWTHRDALDSKELPASLAIVGGGVIGMEFASFFNSLGVQVTVIEMMDEILGGMDKELSALLRAEYAKRGIKFLLSTKVVALSQTEEGAVVSYENAEGKGSVIAEKLLMSVGRRPVTKGFGLENLNLDKTGRGAIKVNEKMQTSLSGVYVCGDLTGFSLLAHTAVREAEVAVHSILGKEDAMSYRAIPGVVYTNPEIAGVGETEESASAKGITYKVVKLPMAYSGRFVAENEGVNGVCKVLLDEQERIIGAHVLGNPASEIITLAGTAIELGLTAAAWKKVVFPHPTVGEIFREAL

SEQ ID NO: 18649 - protein, 208 aa, Ustilago maydis 521
MAGLSADYDYLFKLLLIGDSGVGKSCLLLRFADDTYTESYISTIGVDFKIRTIELEGKTVKLQIWDTAGQERFRTITSSYYRGAHGIIVVYDVTDNDTFSNVKQWLQEIDRYACEGVNKLLVGNKSDLTNKKVVEYATAKDFADQLQIPFLETSAKSATNVEQAFLTMAKQIKDRMGSSTVNNQAGGKSTLKVGQGQNVSQQSNGGCC

SEQ ID NO: 18650 - protein, 197 aa, Glycine max
MASATRLVHCELRSARPAVRPREPAGPVQVTIPKPKPKAAEAEGANIVLQPRLCTLRSYGSDRAGVLIKTRKEGDHDDVSPFFAALSDYIESSKKSQDFEIISGRLAMMVFAATVTMEVVTGNSVFRKMDIEGITEAGGVCLGAVTCAALFAWFCSARNRVGRIFTVSCNAFIDSVIDQIIDGLFYEGDPTDWPDEP

SEQ ID NO: 18651 - protein, 47 aa, Glycine max
  unsure (1)..(47): unsure at all Xaa locations
FNFRWTRRTLVLVGILGIAIPVLVYKGIAREFHMQNXNNGRPYRKFI

SEQ ID NO: 18652 - protein, 215 aa, Zea mays
MAHRMDNEYDYLFKIVLIGDSGVGKSNILSRFTRNEFCLESKSTIGVEFATRTLQVEGKTIKAQIWDTAGQERYRAITSAYYRGAVGALLVYDITKKQTFENIQRWLRELRDHADSNIVIMMVGNKSDLNHLRSVAEEDGQALAEKEGLSFLETSALEALNVEKAFQTVLSDIHQIISKKALAAQEAAGSGPPGQGTTINIADPSANTKRGCCSS

SEQ ID NO: 18653 - protein, 317 aa, Zea mays
  unsure (1)..(317): unsure at all Xaa locations
MKSRFLVLCAIVCVMAQMGDANVVLLGNNLTLSFADIEASFSPGVKGSGVNGIVYASEPLNACSPLTIKAVKGPPSPFALIVRGGCTFDEKVXNAQDAGFKAAIVYDNENSGVLVSMAXSSSGIHIYAVFVSKASGEVXKKSSGHTDVEXTCFFVRRHRIRRDHPRIPEAREFHGMSSQLVKAMPSLIFTKVQEDNCTSSMCAICLEDYSVGEKLRVLPCRHKFHAACVDLWLTSWRTFCPVCKRDATSGVSELPATEATPLLSSAVRLPSQPSSFRSSVAASPPRPISRHPSLHSVSRAYSVSSTPHSPNPFRSHT

SEQ ID NO: 18654 - protein, 559 aa, Escherichia coli
MKQKITDYLDEIYGGTFTATHLQKLVTRLESAKRLITQRRKKHWDESDVVLITYADQFHSNDLKPLPTFNQFYHQWLQSIFSHVHLLPFYPWSSDDGFSVIDYHQVASEAGEWQDIQQLGECSHLMFDFVCNHMSAKSEWFKNYLQQHPGFEDFFIAVDPQTDLSAVTRPRALPLLTPFQMRDHSTRHLWTTFSDDQIDLNYRSPEVLLAMVDVLLCYLAKGAEYVRLDAVGFMWKEPGTSCIHLEKTHLIIKLLRSIIDNVAPGTVIITETNVPHKDNIAYFGAGDDEAHMVYQFSLPPLVLHAVQKQNVEALCAWAQNLTLPSSNTTWFNFLASHDGIGLNPLRGLLPESEILELVEALQQEGALVNWKNNPDGTRSPYEINVTYMDALSRRESSDEERCARFILAHAILLSFPGVPAIYIQSILGSRNDYAGVEKLGYNRAINRKKYHSKEITRELNDEATLRHAVYHELSRLITLRRSHNEFHPDNNFTIDTINSSVMRIPRSNADGNCLTGLFNVSKNIQHVNITNLHGRDLISEVDILGNEITLRPWQVMWIK

SEQ ID NO: 18655 - protein, 504 aa, Sphingomonas sp. LB126
MMESTGNAAIFEQARARIARPFGHFINGLWEAGSGEPIAVVNPATEQPIGSIAAGGEAEVDRAVAAARQRFESAEWTRMPAAERERLLLRLADLVERDRDELAAIETLDNGMPFAPARMMAVGSAISAIRYNAGWARRMTGEEAPVSVPGRWHGYTSREPLGVAALIVPWNAPFAITCNKVSAALAAGCTVVLKPAELAPMSGLRLAELVQEAGFPDGCLNVVTGLGAQAGAALVRHPGVDKISFTGSTATGQSILRETAGRLTRVSLELGGKSAVLVFPDADLEKAIPAVAMGIFGNSGQVCAAGSRLFLHDSVFDRFVTGLVDFAEKLMVGPGDQPGVALGPLISAGQKERVMGYIAAGEAEGAQIATRGSAPDEPGYFVKPTIFVDTRPDMRIVREEIFGPVLSVMRFSDDNLENLARQANDSIYGLSAYVWTRDLSTAHAMARYLRAGSVKVNGSGMEFALPFGGFKQSGIGRENGPRGGGSLYRKEVGNDRLVMVWTAL

SEQ ID NO: 18656 - protein, 217 aa, Cryptomeria japonica
MVRGKVNLQRIQNPVNRRVTFSKRKAGLLKKAGELSVLCEAEICSIIFSPTGKLFEFASHSMNRIIGKYKKNCASIGHHIQLQEHLETLRMELENLRIETTHLEKTCKHMNGEDLDFLNFKELQKLEKKMSLSARKIHLRKDKILVENVGSLKSKEKLLELENAEMDKKIGRSHKACHLNINMMDEVNSKLETEASTRQDCLKLTLISRNFHDDNFC

SEQ ID NO: 18657 - protein, 422 aa, Oceanobacillus iheyensis HTE831
MQEIKIPELAESITEGTIAEWLVKKGDKVEKGDPVVELETDKVNVEVNAEFSGVITEIISEEGDDVTVGDTIAKLDENGEAGSNSDESEPKEEPKQEEKQEDDKKKASETETSKGAETKSESNGEVIASPAARKRARELNIDLSSVQSRDPLGRVRTEDVEAQAQANKQPAEKKQEKKDAPKSEKTEFDKPVERVKMTRRRQTIAKNLVEVQHNTAMLTTFNEVDMTAVMELRKQRKDKFLDKNGVKLGFMSFFTKAVVGALKEFPLLNAEIQGNELVIKKFYDIGIAVSTDDGLVVPVVRDADRKDFAGIEQDINDLGIKARDNKLTLKDLQGGSFTITNGGTFGSMMSTPILNAPQVGILGMHNIVKRAMVMPDDSIEVRPMMYLALSYDHRIVDGKEAVQFLVRIKQMLEDPYDLLLEG

SEQ ID NO: 18658 - protein, 530 aa, Aspergillus niger
MAEGFVDASRVEAPVTLKTYLMCAFAAFGGIFFGYDSGYISGVMGMRYFIEEFEGLDYNTTPTDSFVLPSWKKSLITSILSAGTFFGALIAGDLADWFGRRTTIVSGCVVFIVGVILQTASTSLGLLVAGRLVAGFGVGFVSAIIILYMSEIAPRKVRGAIVSGYQFCITIGLMLASCVDYGTENRLDSGSYRIPIGLQLAWALILGGGLLCLPESPRYFVKKGDLAKAAEVLARVRGQPQDSDYIKDELAEIVANHEYEMQVIPEGGYFVSWMNCFRGSIFSPNSNLRRTVLGTSLQMMQQWTGVNFVFYFGTTFFQSLGTIDDPFLISMITTIVNVCSTPVSFYTIEKFGRRSLLLWGALGMVICQFIVAIVGTVDGSNKHAVSAEISFICIYIFFFASTWGPGAWVVIGEIFPLPIRSRGVALSTASNWLWNCIIAVITPYMVDKDKGDLKAKVFFIWGSLCACAFVYTYFLIPETKGLTLEQVDKMMEETTPRTSAKWTPHGTFTAEMGLTANAVAEKATAVHQEV

SEQ ID NO: 18659 - protein, 291 aa, Medicago sativa
GENVEKIGEGTYGVVYKARDRVTNETIALKKIRLEQEDEGVPSTAIREISLLKEMQHRNIVRLQDVVHSDKRLYLVFEYLDLDLKKHMDSSPEFIKDPRQVKMFLYQMLCGIAYCHSHRVLHRDLKPQNLLIDRRTNSLKLADFGLARAFGIPVRTFTHEVVTLWYRAPEILLGSRHYSTPVDVWSVGCIFAEMANRRPLSPGDSEIDELFKIFRILGTPNEDTWPGVTSLPDFKSTFPRWPSKDLATVVPNLEPAGLDLLNSMLCLDPTKRITARSAVEHEYFKDIKFVP

SEQ ID NO: 18660 - protein, 94 aa, Zea mays
SWCTFFQVNQIGTVTESIQAALDSKAAGWGVMVSHRSGETEDNFIADLAVGLASGQIKTGAPCRSERLAKYNQLLRIEEELGNVRYAGEAFRSP

SEQ ID NO: 18661 - protein, 393 aa, Streptococcus mutans
MAEKVSFEEGKLQVPDKPVIPYIEGDGVGQDIWKNAQIVFDKAIAKVYGGHKQVIWREVLAGKKAYKETGNWLPNETLEIIKTHLLAIKGPLETPVGGGIRSLNVALRQELDLFACVRPVRYFKGVPSPLKHPEKTAITIFRENTEDIYAGIEWNAGTAEVQKVINFLQDDMQVKKIRFPKSSSIGIKPISIEGSQRLIRAAIEYALANNLTKVTLVHKGNIQKFTEGGFRKWGYELAKREYAAELASGQLVVDDIIADNFLQQILLKPERFDVVALTNLNGDYASDALAAQVGGIGISPGANINYQTGHAIFEATHGTAPDIAGQDLANPSSVLLSGCMLFDYIGWSKVSDLIMKAVEKAIANGQVTIDFAKELGVEALTTCQFSEVLLTYL

SEQ ID NO: 18662 - protein, 198 aa, Brassica rapa
MSASRFIKCVTVGNGAVGKTCLLISYTSNTFPTDYVPTVFDNLSANVIVDGNTINLGLWDTAGQEDYNRLRPLSYRGADVFLLAFSLVSKASYENVSKKWVPELRHYAPGVPIILVGTKLDLRDDKQFFVEHPGAVPISTAQGEELKKLIGAPAYIECSAKTQQNVKAVFDAAIKVVLQPPKNKKRKKRKSQKGCSIL

SEQ ID NO: 18663 - protein, 493 aa, Glycine max
  unsure (1)..(493): unsure at all Xaa locations
MDPYKNRPSSAFNSPFWTTNSGAPIWNNNSSLTVGSRGPILLEDYHLVEKLANFDRERIPERVVHARGASAKGFFEVTHDISHLTCADFLRAPGVQTPLIVRFSTVIHERGSPETLRDPRGFAVKFYTREGNFDLVGNNFPVFFVRDGLKFPDMVHALKPNPKSHIQENWRILDFFSHHPESLHMFSFLFDDVGIPQDYRHMDGFGVNTYTLINKAGKALYVKFHWKTTSGEKSLLDDEAIRVGGSNHSHATQDLYDSIAAGNYPEWKLYIQTLDPENEDRLDFDPLDVTKTWPEDVLPLQPVGRMVLNKNIDNFFAENEQLAFCPAIIVPGVYYSDDKLLQTRVFSYADTQRHRLGPNYLQLPANAPKCAHHNNHHDGFMNFMHRDEEVNYFPSRYDPVRHAEXRVPVPPRILGGKREKCMIEKENNFKQPGERYRSWPSDRQERFVRRWVDALSDPRVTHEIRSIWISYWSQADRSLGQKIASHLNLKPSI

SEQ ID NO: 18664 - protein, 114 aa, Oryza sativa
MVRPPCCDKDGVKKGPWTPEEDLVLVSYVQEHGPGNWRAVPTRTGLMRCSKSCRLRWTNYLRPGIKRGNFTDQEEKLIVHLQALLGNRWAAIASYLPERTDNDIKNYWNTHLKR

SEQ ID NO: 18665 - protein, 463 aa, Rhodopseudomonas palustris CGA009
MYQPNLDLAEMFAAREANRSSMHARHLNEQLVRVLKTIGYDVGFQKGTGQYLYDRDGARYLDLLSGFGVFALGRNHPVVRKALQSVLDADLPNLVQLDVSTLAGILAERLLEQVPYLDKVFFANSGAESVEAAIKFARGATGRNGIVNCDHSYHGLTYGALSLTDDQNFQGGFGPLLPGVTTIPFNDLEALEKVLSTREVAAFIVEPIQGKGVNMPTDEFLPGAAALCKRYGTLFVADEIQTGMGRTGRFLAVEHWNVEPDMVLLSKALSGGHVPVGAVLTRKSIFDKIFNRMDRAVVHGSTFAKNDLAMAAGIATLEVLKAEKLVEAAAKRGAELRLALTRMVPGYELLKEVRGKGLMIGVEFGPPQSLRLKASWTMLETANKGLFVQLITVPLFKDHKILTQVAGHGLHTIKLLPPLTITEDDCAWIERAFDDTIAASHKVPGAIWSLGKTLVDNAVRKSA

SEQ ID NO: 18666 - protein, 524 aa, Aspergillus niger
MAPPKYAGMSGRPLSLFLSGIATMGFLLFGYDQGVMSGIISDAAFNNVFTATRNDNVMQATVTAVYEGCLVGAIFALIFGETLGRRLMVISGAWVMIIGVIIQVTAMPGHIPLLQFIFGRVITGIGNGMNTSTIPTYQAECSKSTNRGLLICIEGGIIAIGTAIAYWIDFGAHYGPPDLVWRFPIAFQIFFGILIIVGMMYLPDSPRYLIAHGKVEEGTRVLAALAGSEIDDPHVQLEKQLTLDSIRAFRDLLTGGPSQHFRRMIVGSSSQFFQQISGCNAVIYYLPVLLEQSIGQSHDFALLIGGVNMICYAIFATFSWFFIEKIGRRKLFLGGSYGQCAAMIIVFGCLIPGDSESAKGAVFGFFLYMCVFGATWLPLPWLYPAEISPLKTRSKANAVSTCSNWLFNFTVVMITPVMVQHIGWGTYLFFAAWNGLFIPVIWFFYPETAGRSLEEIDLIFAKGYVENMSYVRASKELPKLTDEEIEAKAAEYGILGDEEKAEERIAEKDPPASAEFSQFQPTQL

SEQ ID NO: 18667 - protein, 97 aa, Guillardia theta
MKLSKTIYVGSLSKKLKENFLWYFFSRLGKIKRLIIGINNKTLLPCGFCFVEYFFDFNFELSFKVLSGFRIFNHFIKLDKDNGFKDNRQLSRKIVLE

SEQ ID NO: 18668 - protein, 583 aa, Aspergillus niger
MGVSNMMSRFKPQADHSESSTEAPTPARSNSAVEKDNVLLDDSPVKYLTWRSFILGIVVSMGGFIFGYSTGQISGFETMDDFLQRFGQEQADGSYAFSNVRSGLIVGLLCIGTMIGALVAAPIADRMGRKLSICLWSVIHIVGIIIQIATDSNWVQVAMGRWVAGLGVGALSSIVPMYQSESAPRQVRGAMVSAFQLFVAFGIFISYIINFGTERIQSTASWRITMGIGFAWPLILAVGSLFLPESPRFAYRQGRIDEAREVMCKLYGVSPNHRVIAQEMKDMKDKLDEEKAAGQAAWHELFTGPRMLYRTLLGIALQSLQQLTGANFIFYYGNSIFTSTGLSNSYVTQIILGAVNFGMTLPGLYVVEHFGRRNSLMVGAAWMFICFMIWASVGHFALDLADPQATPAAGKAMIIFTCFFIVGFATTWGPIVWAICGEMYPARYRALCIGIATAANWTWNFLISFFTPFISSSIDFAYGYVFAGCCFAAIFVVFFFVNETQGRTLEEVDTMYVLHVKPWQSASWVPPEGIVQDMPAPLPLPSRRVRLRWLSTPSPLSSASKPLALARTHFASCSCTLNLHLKL

SEQ ID NO: 18669 - protein, 460 aa, Ferroplasma acidarmanus
  unsure (1)..(460): unsure at all Xaa locations
MTEYDLAIIXWVPTVFAAAIKASELTSNQMKIALIGTGELGGTCVNVGCVPSKFLIEASKNYKEAKSPAYAGITSSATLDFSEFMESLNQFVSGERETKYTSVMKNFENIDLIEGLAKFIDNDTISVNNTELKATNFIIATGSRTFIPEVRGLTDYYTSDTVWKMRKLPGKLAVIGSGEVALELAYAFSNFGSEVHIFNRSNRILKGFDDDVNSQLMAALKSNGIVFHLGVNFYEIKNEEGKKDIVTWTGTFGDFDEIIVATGRMPNIDGLDLRAGGITADNGIVVNPDFRTTNPKIYAAGDCVRQSLKLETLAGKEGVIAVENILGGNRKINMQEVPWVVFTEPNVASVGYTEAELKKKHIEYDVRTVELKNVVKANILNSYTGIAKIISGKDKKILGIHVIAPMAAEFITEGVYLIKNGLTYDDLIDTIHVFPTVAESIKITGQAFIRDISKMSCCMD

SEQ ID NO: 18670 - protein, 514 aa, Aspergillus niger
MRLPKIKMPRKRPQDELNGDVLQQEAQATGPNGQKSEEGIVDTPIPLLTWRSFLMGIFVSMGGFLFGYDTGQISGFLEMPNFLQRYGQQQADGTYYFSNARSGLIVALLSIGTLIGALIAAPIADRVGRKWSISGWSAMVCVGITIQISSPFGKWYQVAMGRWVAGLGVGALSLLVPMYQAETGPRHIRGSLVSTYQLFITLGIFVANCINFGTEARNDTGSWRIPMGITYIWAMILGFGIALFPESARYDYRHGREAKAARTLSRISSWKEQERGEITWSHLFHAPRMKYRVAVGVALQALQQLTGANYFFYYGTTIFRGAGISNSYVTQMILGGVNFGTTFLGLYLIENYGRRRSLITGALWMFVCFMVFASVGHFSLDHENPERTHTAGVVMVVFACLFILGFASTWGPMVWTIIAELYPSEFRARAMSLATASNWLWNFLLAFFTPFITSAIDFRLGYVFAGCLFLAAGLVYVAVIEGRGRTLEEIDTMYVMKVPPWKELQVCISGHRSI

SEQ ID NO: 18671 - protein, 527 aa, Aspergillus niger
MAPTYAGLSGRKLSLAVSTIATMGFLLFGYDQGVMSGIISDTAFEDLFTATKNNPTMQALVTSVYELGCLVGAMFALFFGDKTGRKWMIFSGAIVMIIGVVIQVTSYAGHIPLLQFFIGRVITGIGNGMNTSTIPTYQAECSKTSNRGLLICIEGGIIAIGTAIAYWIDYGAHFGNKDLVWRFPIAFQIFFGLIIIVGMWFLPDSPRYLISKDRVQEGEYVLAALGGWEIHDHETQLQKQLVIDSIRASNAAGKDVGYRDLLTGGRSQHFRRMVIGSSSQIFQQLGGCNAVIYYLPVLLQDSLHETENFSLVIGGVNMIVYAIFATFSWFFIEKIGRRKLFLGGSFLQCIAMVITFACLIPGDQETAKGAVFGLFLYMAAFGAAWLPLPWLYPAELSPIKTRAKANAVSTCSNWLFNFLIVMITPVMVSHIGWGTYLFFAVLNGLFIPFIWFFYPETANRSLEEIDIIFAKGYTENISYVRAAHELPKLTDEEVEQKAMEYGFGGASDEEKVTTAEVSGSNSARESE

SEQ ID NO: 18672 - protein, 1131 aa, Sorghum bicolor
MSSSRPAHSSSSSSRTRQSSQARILAQTTLDAELNAEYEESGDSFDYSKLVEAQRSTPSEQQGRSGKVIAYLQHIQRGKLIQPFGCLLALDEKSFRVIAFSENAPEMLTTVSHAVPNVDDPPKLGIGTNVRSLFTDPGATALQKALGFADVSLLNPILVQCKTSGKPFYAIVHRATGCLVVDFEPVKPTEFPATAAGALQSYKLAAKAISKIQSLPGGSMEALCNTVVKEVFELTGYDRVMAYKFHEDEHGEVFAEITKPGIEPYLGLHYPATDIPQAARFLFMKNKVRMICDCRAKSVKIIEDEALSIDISLCGSTLRAPHSCHLQYMENMNSIASLVMAVVVNENEEDDEPGPEQPPQQQKKKRLWGLIVCHHESPRYVPFPLRYACEFLAQVFAVHVNKEFELEKQIREKSILRMQTMLSDMLFKEASPLSIVSGSPNIMDLVKCDGAALLYGDKVWRLQTAPTESQIRDIAFWLSEVHGDSTGLSTDSLQDAGYPGAASLGDMICGMAVAKITSKDILFWFRSHTAAEIKWGGAKHDPSDKDDNRRMHPRLSFKAFLEVVKMKSLPWSDYEMDAIHSLQLILRGTLNDALKPVQASGLDNQIGDLKLDGLAELQAVTSEMVRLMETATVPILAVDGNGLVNGWNQKVAELSGLRVDEAIGRHILTLVEDSSVSIVQRMLYLALQGKEEKEVRFELKTHGSKRDDGPVILVVNACASRDLHDHVVGVCFVAQDMTVHKLVMDKFTRVEGDYKAIIHNPNPLIPPIFGADQFGWCSEWNVAMTKLTGWHRDEVIDKMLLGEVFDSSNASCLLKSKDDFVRLCIIINSALAGEEAENAPFGLFDRNGKYIECLLSVNRKVNADGVVTGVFCFIHVPSDDLQHALHVQQASEQTAQRRLKAFSYMRHAINKPLSGMLYSRETLKSTGLNEEQMRQVHVADSCHRQLNKILADLDQDNITDKSSCLDLDMAEFVLEDVVVSAVSQVLIGCQGKGIRVACNLPERFMKQKVYGDGIRLQQILSDFLFVSVKFSPVGGSVDISSKLTKNSIGENLHLIDFELRIKHQGAGVPAEILSQMYEEDNKEPSEEGLSLLVSRNLLRLMNGNIRHIREAGMSTFILTAELAAAPSAVGQ

SEQ ID NO: 18673 - protein, 346 aa, Corynebacterium glutamicum ATCC 13032
MEDMRIATLTSGGDCPGLNAVIRGIVRTASNEFGSTVVGYQDGWEGLLGDRRVQLYDDEDIDRILLRGGTILGTGRLHPDKFKAGIDQIKANLEDAGIDALIPIGGEGTLKGAKWLSDNGIPVVGVPKTIDNDVNGTDFTFGFDTAVAVATDAVDRLHTTAESHNRVMIVEVMGRHVGWIALHAGMAGGAHYTVIPEVPFDIAEICKAMERRFQMGEKYGIIVVAEGALPREGTMELREGHIDQFGHKTFTGIGQQIADEIHVRLGHDVRTTVLGHIQRGGTPTAFDRVLATRYGVRAARACHEGSFDKVVALKGESIEMITFEEAVGTLKEVPFERWVTAQAMFG

SEQ ID NO: 18674 - protein, 420 aa, Staphylococcus aureus subsp. aureus MW2
MIKIPRGTQDILPEDSKKWRYIENQLDELMTFYNYKEIRTPIFESTDLFARGVGDSTDVVQKEMYTFKDKGDRSITLRPEGTAAVVRSYIEHKMQGNPNQPIKLYYNGPMFRYERKQKGRYRQFNQFGVEAIGAENPSVDAEVLAMVMHIYQSFGLKHLKLVINSVGDMASRKEYNEALVKHFEPVIHEFCSDCQSRLHTNPMRILDCKVDRDKEAIKTAPRITDFLNEESKAYYEQVKAYLDDLGIPYIEDPNLVRGLDYYTHTAFELMMDNPNYDGAITTLCGGGRYNGLLELLDGPSETGIGFALSIERLLLALEEEGIELDIEENLDLFIVTMGDQADRYAVKLLNHLRHNGIKADKDYLQRKIKGQMKQADRLGAKFTIVIGDQELENNKIDVKNMTTGESETIELDALVEYFKK

SEQ ID NO: 18675 - protein, 520 aa, Methanopyrus kandleri AV19
MCGIACAVGDDDIAAMVTAMEHRGPDGRGFASVSDDGVEFSEEPPSEGEVVLGHVRLWVRGEASAVQPIVEEDRAVAVNGEIYNYRRFVEDAPSDSWAVFEVVRSVRDAAAALRVLRGEYAFVAAFRDGTVVAARDPIGVRPLYYCVEAGLAVASERKALWAAGFRDVRRVPPGALLVLRDGRVELRNVVDVPRSRPGRSSWKDLLEVLQRSVRERVEETERVGVVLSGGVDSSTVAKLASEYVDVKCYAAGFEGSDDVEVAERLCDEMGWPFVSVSLEDEFERYVVATVYAVETWNPMKVEVGIPILACAGAMSDDGIRVMLSGQGADELLGGYHRHLRHYGDWDRFSWELWKDVAAIHAVNLERDDKAGMHHSVELRVPYLDLDVVRTGLGIDPRENVSGPEDNLRKRALRRVAAELGLPDFVVERRKRATQYGSLTSKMLDKLVRELGIKRAVAKRLGYRSHKELFLRLVGKYLGFPWEAPSVEEVERECARLGVEPEISEFLEERVLTFDSDLRAG

SEQ ID NO: 18676 - protein, 207 aa, Triticum aestivum
MRRGGGAATAVAAAAEAERDAGARFRGVRKRPWGRYAAEIRDPAKKARVWLGTFDSAEDAARAYDAAARMLRGPKAKTNFPLSLPHHHQLQASYSPYPVAAAAAVPTSVAAAAARPACSSLSSTVESFGGPRARPVLPPRPPPPPILDGDCHSDCGSSASVVDDDCADAAASPSCGLLLPFDLNLPPEFGGVACNDDDELKLTALRL

SEQ ID NO: 18677 - protein, 142 aa, Brassica napus
MAMSLSGSAVLIGIGSSFSSGIAKQSGVGAVGFGRKTELVVVAQRKKSLIYADKGDGNILDDLNEATKRASDYATEKTKEALKNGEKAKDYVVDKNVEAKDTAVDEAQKALDYVKAKGNEAGNKVAEFVEGKAGEAKDATKA

SEQ ID NO: 18678 - protein, 142 aa, Brassica napus
MAMSLSGSAVLSGIGSSFSSGAAKQSGVGAVGFGRKTEFVVVAQRKKSLIYADKGDGNILDDLNEATKRASDYATEKTNEALKHGEEAKDYVVDKNVEDKDTAVDEAQKALDYVKAKGNEAGNKVAEFVEGKAGEAKDATKA

SEQ ID NO: 18679 - protein, 467 aa, Oryza sativa (japonica cultivar-group)
MEQPNDVGILAMDIYFPPACVHQEALEAHDGASKGKYTIGLGQDCMAYCSEVEDVISMSLTVVASLLKKYNIDPKQIGRLEVGSETVIDKSKSIKTWLMHIFEESGNTDIEGVDSSNACYGGTAALLNCVNWVESKSWDGRYGLVVCTDSAVYAEGPARPTGGAAAIAMLIGPNAPISFESKYRASHMAHVYDFYKPDLASEYPVVDGKLSQTCYLMALDSCYRQYCTKYEKIVGEQFSISDAEYCVFHSPYNKLVQKSFARLYFNDFMRNCSTVDNDAKEKLQPFANLTSEESYQSRDLEKASQQVAKHLYDIKVQPSTLLPKQIGNMYTASLYAALASVIYNKHDSLDGQRILMFSYGSGLTSTMFSLRLHDGQHPFSLMNIASVLDVTTKLESRHVTSPEKFIETLKLMEHRYGAKDFETSKDTSLLPPGTFYLTKVDSMYRRFYDKKAAEGKIKGCNGIANGH

SEQ ID NO: 18680 - protein, 377 aa, Oceanobacillus iheyensis HTE831
MRDKTKMIHGGITSDERTGAVNVPIYQVSTYKQDAPGEHRGYEYSRTGNPTRHALETVIAELEEGNAGFAFGSGMAAITSIMMLLESGDHVIMTDDVYGGSYRLMTKVLNQYNIEHTFIDTSSEESVINAIKPNTKAIYVETPTNPLLKITDIKEISTIAQKHNLLLIVDNTFATPYWQKPLTMGADIVLHSATKYIGGHSDVVAGLVAVKSNELAERIHFIQNSVGAVLGPQDSWLLQRGIKTLAIRMEAIEQNTKKLIAYLEQNPRVEKIYYPGLENHPGHHIAKQQASGFGGMVSIDVGSGDLADKILSKVEFFTLAESLGAIESLISIPAKMTHASIPADRRQELGITDGLIRLSVGIEDIDDLIDDLEKSMQ

SEQ ID NO: 18681 - protein, 261 aa, Oryza sativa
SSSSSKHFILVHGLCHGAWCWYKVVTMLRSEGHRVTALDLAASGVHPARVDEVHSFEEYSQPLLDAVAEAPAGERLILVGHSFGGLSIALAMERFPEKIAVAVFVAAAVPCVGKHFFLFVQLIREKAPKDMLLDSKMIPINNKQGPGTAILLGPNFLAEKGYPLSPAEDLTLAKLLVRPTSQFVDDPTMKDDRLLTSANYGSVKRVCLMAMEDDLKEVHRYMITLSPGVEVEEIAGADHAVMCSRPRELSDLLAKIGSKYD

SEQ ID NO: 18682 - protein, 513 aa, Zea mays
  unsure (1)..(513): unsure at all Xaa locations
ITMDPTKFRPSSSHDTTVTTTNAGAPVWNDNEALTVXGPRGPILLEXYHLIEKVAHFARERIPERVVHARGASAKGXFECTHDVTSLTCADFLRAXPGVRTPVIVRFSTVIHERGSPETIXRDPRGFAXVKFYTREGNWDLLGNNFPVFFIRDGIKFPDVIHAFKPNPRSHVQEYWXRVFDFLSHLPESLHTFFFLFDDVGVPSDYRHMEXGFGVNTYTFVSAAGKXAQYVKFHWEARRAGVRCIPDGRGRRPPGSGGRNHSHAXTQDLYDSIAAGSFPEWTLYVQVMDPDTEEQYDFDPLDDTKTWPEDLLPLRPVGRLVLDRNVDNFFNENEQLAFGPGLVVPGIYYSDDKMLQCRVFAYADTQRYRLGPNYLMLPVNAPRCAHHNNHYDGAMNFMXTADEEVDYYPSXRHAPLRQAAPAPRPLPPRPXVAGRREKATIRKPNDFKQPGERYXRSWDADRXQDRFVRRFADSLGHPKVXQELRSIWIDLLAKCDASLGMKIATRLNMKPNM

SEQ ID NO: 18683 - protein, 1135 aa, Sorghum bicolor
MSSPLNNRGTCSRSSSARSRHSARVVAQTPVDAQLHAEFESSQRNFDYSSSVSAAIRPSVSTSTVSTYHQTMQRGLYIQPFGCLLAVHPDTFTLLAYSENAPEMLDLTPHAVPTIDQRDALAVGADVRTLFRSQSSVALHKAATFGEVNLLNPILVHARTSGKPFYAILHRIDVGLVIDLEPVNPVDVPVTAAGALKSYKLAAKAISRLQSLPSGNLSLLCDVLVREVSELTGYDRVMAYKFHEDEHGEVISECRRSDLEPYLGLHYPATDIPQASRFLFMKNKVRMICDCSATLVKIIQDDSLAQPLSLCGSTLRASHGCHAQYMANMGSVASLVMSVTISNDEEEDVDTGSDQQPKGRKLWGLVVCHHTSPRFVPFPLRYACEFLLQVFGIQLNKEVELAAQAKERHILRTQTLLWDMLLRDAPVGIFTQSPNVMDLVKCDGVALYYQNQLLLLGSTPSESEIKSIATWLQENHDGSTGLSTDSLVEAGYPGAAALREVVCGMAAIKISSKDFIFWFRSHTTKEIKWGGAKHEPVDADDNGRKMHPRSSFKAFLEVVKWRSVPWEDVEMDAIHSLQLILRGSLQDEDANRNNVRSIVKAPPDDTKKIQGLLELRTVTNEMVRLIETATAPVLAVDIAGNINGWNNKAAELTGLPVMEAIGRPLIDLVVVDSIEVVKRILDSALQGIEEQNLEIKLKAFHEQECNGPIILMVNSCCSRDLSEKVIGVCFVGQDLTTQKMIMDKYTRIQGDYVAIVKNPSELIPPIFMINDLGSCLEWNKAMQKITGIQREDVIDKLLIGEVFTLHDYGCRVKDHATLTKLSILMNAVISGQDPEKLLFGFFDTDGKYIESLLTVNKRINAEGKITGAICFLHVASPELQHALQVQKMSEQAATNSFKELTYIHQELRNPLNGMQFTCNLLEPSELTEEQRKLLSSNILCQDQLKKILHDTDLESIEQCYMEMNTVEFNLEEALNTVLMQGIPLGKEKRISIERDWPVEISRMYLYGDNLRLQQVLADYLACALQFTQPAEGPIVLQVIPKKENIGSGMQIAHLEFRIVHPAPGVPEALIQEMFRHNPEVSREGLGLYICQKLVKTMSGTVQYLREADTSSFIILIEFPVAQLSSKRSKPSTSKF

SEQ ID NO: 18684 - protein, 458 aa, Nostoc sp. PCC 7120
MTFDYDLFVIGAGSGGLAASKRAASYGAKVAIAENDLVGGTCVIRGCVPKKLMVYGSHFPALFEDAAGYGWQVGKAELNWEHFITSIDKEVRRLSQLHISFLEKAGVELISGRATLVDNHTVEVGERKFTADKILIAVGGRPIKPELPGMEYGITSNEIFHLKTQPKHIAIIGSGYIGTEFAGIMRGLGSQVTQITRGDKILKGFDEDIRTEIQEGMTNHGIRIIPKNVVTAIQQVPEGLKISLSGEDQEPIIADVFLVATGRVPNVDGLGLENAGVDVVDSSIEGPGYSTMNAIAVNEYSQTSQPNIYAVGDVTDRLNLTPVAIGEGRAFADSEFGNNLREFSHETIATAVFSNPQASTLGLTEAEARAKHGDDAVTIYAPFRPMYHSFTGKQERIMMKLVVDTKTDKVLGAHMVGENAAEIIQGVAIAVKMGATKKDFDATVGIHPSSAEEFVTMR

SEQ ID NO: 18685 - protein, 290 aa, Actinobacillus actinomycetemcomitans
MKGIILAGGSGTRLYPITRGVSKQLLPVYDKPMIYYPLSVLMLAGVRDILIITTPEDNESFKRLLGDGSEFGVNLQYAIQPSPDGLAQAFLIGEGFINGDSCCLVLGDNIFYGQNFTQMLQQAVARPYGATVFGYLVKDPGRFGVVEFDENFKAVSIEEKPAQPKSNYAVTGLYFYDNRVVDFAKQVKPSARGELEITTLNEMYLKDGSLNVQLLGRGFAWLDTGTHESLHEGASFVRTVESVQGLQVACLEEIAWRNGWLTSEQVETLARPMVKNEYGQYLLRLINEEK

SEQ ID NO: 18686 - protein, 1003 aa, Pseudomonas syringae pv. syringae B728a
MEFTQLIKDMLDAKPDAALEAALAECAREPIRVPGAIQPHGVLLSVAGDPLCIEQVSANCATEFGMAADELLGKPLSWLLSPEQSALIDHAYGHPAAPHIDPIKLTIGTAHYSASLQRADDVLIIELEPFVETGHGQSRIITRVLRNLQAATTLETLFDISVHEIQALTGYDRVMIYRFEPEGHGQVVAQALTGPLPSYSGLNFPGSDIPAQARELYRLNWIRVIPDATYVPVPLIPTLRPATGQPLDLGFSTLRSVSPVHCEYLKNMGVRSSMSISLLDGGELWGLVACGHPEPLRVSRELRDACAMIGQLLSVKISAIVATNIQREREEKVVLLGQLADAMSRANHEVLDGLVSRPELLMSLTLADGAAVLIDDQVYLFGTCPSIEQVRELYTWIRDTGLASQRSRQRATGLQGLGVFHTNSMQRELADSAVYRDIASGVIAFTLPKPIDNAVMWFRAQLTSTMNWSGNPTHHVSTRPESSASHRLHPRQSFDVWEQEVTGIASPWSRADLYGAEDIRRSALESDLERQVQREQEAVRLRDELVAVVSHDLRNPMSIIIMQCGMMQSWAVGDTHFENRNIRRALGTIEKATTRMNSLLEDLLDTAQIEAGRYQLSRLPLSVTSLLEEACSLLVMLTTEKNIELNCTAAQGLVIDADPERIFQVLSNLVGNAIKFTPKGGRINIDAVADQNEVLFRVSDDGIGIPAEHLPFIFQRYWSVKEGNPRGNGLGLYICQGIITAHGGRLWADSSLDSGSVFSFTLPVHQGTDSIGETTFLKQSGTTHRLAQSISSKLERQQLEDRLTRAGLLNELNHRVKNTLATVQAIASLTVNSSASLESFHKSFGARLFALSQAHDALARAEWISTELVDLIEQLQEQDSGAHRISFEGDPVTLEPRFSLTLSMVLHELMANALQHGALSSASGQVTVTSTLTAEHTPPTLKIEWKETGGPPVVATTVKGFGLRLIRRSIERELKGQADIQFARTGIIWSMLIPWPDKPESRL

SEQ ID NO: 18687 - protein, 389 aa, Campylobacter jejuni subsp. jejuni NCTC 11168
MLTKRSQVLEESITLAITALANELKAKGEDIISFSAGEPDFDTPQTIKNAAISAIEKGCGKYTAVAGIPEVLKAIQTKFKKDNNLDYETNEIITNVGAKHSLFECIECLVEKDDEVIIPSPYWVSYPEMVKFAGGKPVFIEGLEENGFKITAEQLKKAITAKTKVLMLNSPSNPVGSIYSKEELTQIAKVLEGTQITVLSDEMYEKLRYDGFDFVAFASVSKDALKRTVTINGLSKCGAMPGWRFGYMASKNKALISAVKRLQGQSTSNICSITQHAAIPALNGECDKDIEKMRQAFEKRRNLALDILKQIPNISVYKPEGAFYLFVNIQKIEKDSMKFCQKLLEQEKVAVVPGVGFGMDGYFRLSYATSDELIKKGLERIANFIKNYK

SEQ ID NO: 18688 - protein, 270 aa, Escherichia coli
LLLKTQLPSGSELSLYDIAPVTPGVAVDLSHIPTAVKVKGFSGEDATPALEGADVVLISAGVARKPGMDRSDLFNVNAGIVKNLVQQVAKTCPKACIGIITNPVNTTVAIAAEVLKKAGVYDKNKLFGVTTLDIIRSNTFVAELKGKQPGEVEVPVIGGHSGVTILPLLSQVPGVSFTEQEVADLTKRIQNAGTEVVEAKAGGGSATLSMGQAAARFGLSLVRALQGEQGVVECAYVEGDGQYARFFSQPLLLGKNGVEERKSIGTLSAF

SEQ ID NO: 18689 - protein, 408 aa, Campylobacter jejuni subsp. jejuni NCTC 11168
MINALKGMKDLLDKDAYYYEKVIKICEEVAKNYGFTFINTPHLELCTLFKRSVGESSDIVGKEMYEFIDKGENHVCMRPEGTAGVVRAYIEKKLDKNTSVKRWFYYGSMFRYERPQKGRLREFHQFGVESLGIPNVYEDASIILMLVEIFSRLGIDFKLQLNSLGCSQCLPKYRDRLVEFLDSKEGFCEDCLRRKNLNPIRVLDCKNEHCQNLLENAPLLINNLCTSCQKDFETLQQILKDNGVKFELDSKLVRGLDYYSKTAFEFISDEIGAKAAIAGGGRYDRLIEYLGGKSGYGIGFAMGIERIITILEQKEEKIQREGIYLCAMDEIYIQKLLHIATNLRKEYKVLLSYEARKLAKHLENADKNNTEIFLCMGENEAQNESLFYKNLAKKEEKMIKISDLKKVL

SEQ ID NO: 18690 - protein, 413 aa, Triticum aestivum
  unsure (1)..(413): unsure at all Xaa locations
MQRYSRAADVLGFVYLHPLSKCVASPAAAVSKVAGQPLEMEEVEVAPPRAHEVRIRILCTSLCHTDVTFWRLKDFPGQHPIILGHEAAGVVESVGEHVHEVAVGDTVVPVFSAQCGDCPDCLSDRSNICSGLPARPGMPRDGTTRFSFAATGEPIHNFIGVSSFTEYTVVDVARVVRIGPGVPPEKACLLSCGVSTGVGAAWKVAAVEPGSSVAVFGLGVVGLAVAQGCRMRGAKQIIGVDLNPEKWDIGKRLGITDFVNPNDIGEKAVSEVIKEMTGGGTDYCFECIGSTSVMAEAFQSSRKGWGKTVVLGVSSGGAPMSXIPPHDILMGRSVVGSLFGGLKPKADIPILAQKYLDKELELDEFVTHEMGFHDINAAFELLTQGKCLRCIIWMDGAKANGVEALDNGRACKA

SEQ ID NO: 18691 - protein, 72 aa, Triticum aestivum
MAATIQSVKARQIFDSRGNPTDEGDVCCSDGTFARAAVPSGASSGVYEALELRDRGSGYLGKGVSKAGDNVN

SEQ ID NO: 18692 - protein, 398 aa, Shewanella oneidensis MR-1
MAAAPSGASTGSREALELRDGDKSRYLGKGVLTAVANVNGPIRTALIGKDATAQAELDQIMIDLDGTENKDKLGANAILAVSLAAAKAAAAFKGMPLYAHIAELNGTPGQYAMPVPMMNILNGGEHADNNVDIQEFMVQPVGAKNFREALRMGAEIFHTLKKVLHGKGLSTSVGDEGGFAPNLSSNADALAVIKEAVELAGYKLGTDVTLALDCAASEFYKDGKYDLAGEGKVFDSNGFSDFLKSLTEQYPIVSIEDGLDESDWDGWAYQTQIMGDKIQLVGDDLFVTNTKILTRGIENGIANSILIKFNQIGSLTETLAAIRMAKAAGYTAVISHRSGETEDATIADLAVGTAAGQIKTGSLCRSDRVAKYNQLLRIEEQLGEKAPYRGLKEIKGQA

SEQ ID NO: 18693 - protein, 513 aa, Rhodopseudomonas palustris CGA009
MADAATPPSGFQANLDRAAPLLKQLKADGIGHLIGGEIVAASSGEVFETASPIDNSVLAQVARGTAADIDRAAKAAKAAFPAWRDMAPAKRRKLLHTIADAIEARADDIAVLECIDTGQAHRFMAKAAIRAAENFRFFADKCAEARDGLNTPSDEHWNVSTRVPIGPVGVITPWNTPFMLSTWKIAPALAAGCTVVHKPAEWSPVTADMLARICKDAGLPDGVLNTVHGFGEEAGKALTEHPAIKAIAFVGETATGAAIMAQGAPTLKRVHFELGGKNPVIVFGDADLDRALDAVVFMIYSLNGERCTSSSRLLVQSSIADSFIEKLAARVRALKVGHPLDPATEVGPLIHQRHLDKVCSYVDVARKDGATIAVGGAPFDGPGGGHYVQPTLVTNARSDMQVAQDEVFGPFLTVIPFKDEAEAIQIANDVRYGLTGYVWTADMGRALRVADALEAGMIWLNSENVRHLPTPFGGMKQSGIGRDGGDYSFDFYMETKHVSLARGTHKIQKLGAV

SEQ ID NO: 18694 - protein, 1499 aa, Ustilago maydis 521
MGSISAVGAVARIAVLTSATLVNVAPSGKASTSSFSSVADKASELNAQLDVEHLNQHVELGSVLSQLKPAGNGLISVLSHAHQPTFTRLVPHLPKLVHTPLVFHVASAGEHSDIMALRQSGLVLLHSSTAAQAHDHALLATKIATSAKRAVLHFFEDASGPVEEVTNVDLASFIGSVAASTSTDAAAPKINGLNGHANGINGHVNGVNGANGNANGYASAVASEAGFDDLESAIDAAYEDVAELVGHAVEPFQLVGASDAQNLAVVLGAGSETLQDYTAPHNDLAVLDIRLVRPSLPQRLLDTIPAGIKRIAVLEQSVRRTTKLGPLFVDVASAFQGSERTLPSVFVSAILGHIDNGDNAAKELIKALQAPKPKHAFIVGDLKKLSARAQASPATAATTAPVQVPKHEEAYNLMLEQVFADRLALVNSANEESDDHPAARSPEYAFGQVLAQLEQRDELIRAVNDVLRDGGVSTELHEALSQWLVAKQDVKKNVASSNKVASLLQSSTSGAALQNIKSLSEHLLLKSRWIVGSDAWAYDAGMGGVHHVIASGRNVNMLIFDSVPYTKRDAQAAHKRKKDVALYAMNYGNVYVASTAIYADYTQVLHALMEADKFDGPSVVLAYVPYRTEDAPALDVLRETKLAVDSGYWPLFRWDPSAEARGSDVFRLDGVRLREQLQQFLDRQNLFTTLINSRPELSYDIAASQGNALRELQRRKAKEAYEKMLGSLDGPPLLILVASDGGNAEKVAKKLAVRAKARGVAARLLTMDDFPVTEELKDEKNVVFLTSTAGQGEAPQNGRFTYKALHAMADAALPDTLNFTVFAMGDSHYWPRPEDAHYYNKPGKDIDVRLEQLGATRMTPIGLGDDQDADGYQTGYKIWEPLLWKALGVDTVEVKEAEPEPITNEHMKIASNYLRGTIKEALVDTSTGAIPETDGQLTKFHGTYMQYDRDTLEERKAAGLEPAYSFMIRARIPGGVVTPAQWVQLDDVAEKYGNQTIKITTRQTIQYHCVIKSNLKAAMQGINKSMLDTIAACGDVNRNVMCSPNPNLSELHEDVYEFSKSISEHLLPRMNAYHEIWLDKETDSSKQLLIGGVLQDYEPLYGPYYLPRKFKIAIAVPPRNDTDCFAHDIGLIAIADPVTKRLAGFNLAVGGGMGVTHSMKATYPRLGNVIGFVTPEQTLDACRIVMLIQRDTGNRANRKQARLKYTIDKHWGGADNFKAEVERRLGYKLAEPKSYKFETNTDLYGWTQDYKGNYHCTLWLENGRVKDEPGAPFRTGLRELCKIHKGAFRLTPNQHIIVSDIKPEDKDTIDAHLRKYKMNNWEHSGVKLSASACVAFPTCGLAMAESERYLPLLMDKIESIFEANGLRSTDTVFRMSGCANGCSRPWMAEAGFVGKAPGQYVMTLGGSHNGTRLSKIYRESVDEKEILEIMNKLVPLYAENRIEGESFGDYVIRAGIIKPTTEGKAFYEDMCPSDVVPPSAAAKKGPAQATEHYDRASSA

SEQ ID NO: 18695 - protein, 451 aa, Ferroplasma acidarmanus
MKSFDVVTIGAGGASYPAAFRLKKAGFSVIMIDDKGIMSGNCLAEGCVPSKAIIETVHTYKRISDFGDFRINYRDILKRKDKVQILRNGLHRKELEEAGIEILKGVAKIIDSSTVEVKTEAGNIKLNYKHLIIGSGAYTYMPQIKGIEYAITSADLFRIDPKIKDLPESIAIIGGGYIGVETASYMSIMGSRVELIERSDRILMDMDPEIVGKLEPLLPDMRVHFNNSVISIEPDGDGYKTTIIDNNGKSDSVITACVMMATGREPLIPEGTEEAGIKFNRKGIIVNSSMQTNIPNIYATGYVNGIAPLFHAAKRQSLIAANCIMSGDMPVDRFQDNCVPFTVYTIPNMSFTGITPEKAKELGIKYIKSKYKMADDSLAEIYNEPGGELDLIFDEDMKIIGGYVIGNDAGNIINEISMGLSKGLTARDFAELPHQHPMTFEGLDSAARKLF

SEQ ID NO: 18696 - protein, 113 aa, Enterobacter gergoviae
SDFAGGTVVHINAAVAGLVGAYMMGKRVGFGKEAFKPHNLPMVFTGTAILYVGWFGFNAGSASAANEIAALAFVNTVVATAAAILAWTFGEWALRGKPSLLGACSGAIAGLVA

SEQ ID NO: 18697 - protein, 303 aa, Oryza sativa (japonica cultivar-group)
ENKEGLELLKTAIEKAGYTGKVVIGMDVAASEFYNDKDKTYDLNFKEENNDGSQKISGDSLKNVYKSFVSEYPIVSIEDPFDQDDWEHYAKMTAEIGEQVQIVGDDLLVTNPTRVAKAIQEKSCNALLLKVNQIGSVTESIEAVKMSKRAGWGVMTSHRSGETEDTFIADLAVGLATGQIKTGAPCRSERLAKYNQARLRRSLVRLLSTLVPSSAHPWSPTKLDVVPGTCDLLYREALVWNRMPIYVMGHGANTNNLLTFHRMPIYVMGIWGQGPIPGDAVQMPYLFELEVFPSGQRRATTSL

SEQ ID NO: 18698 - protein, 388 aa, Pyrococcus horikoshii
ALSDRLELVSASEIRKLFDIAAGMKDVISLGIGEPDFDTPQHIKEYAKEALDKGLTHYGPNIGLLELREAIAEKLKKQNGIEADPKTEIMVLLGANQAFLMGLSAFLKDGEEVLIPTPAFVSYAPAVILAGGKPVEVPTYEEDEFRLNVDELKKYVTDKTRALIINSPCNPTGAVLTKKDLEEIADFVVEHDLIVISDEVYEHFIYDDARHYSIASLDGMFERTITVNGFSKTFAMTGWRLGFVAAPSWIIERMVKFQMYNATCPVTFIQYAAAKALKDERSWKAVEEMRKEYDRRRKLVWKRLNEMGLPTVKPKGAFYIFPRIRDTGLTSKKFSELMLKEARVAVVPGSAFGKAGEGYVRISYATAYEKLEEAMERMERVLKERKLV

SEQ ID NO: 18699 - protein, 530 aa, Oryza sativa
MCGILAVLGVADVSLAKRSRIIELSRRLRHRGPDWSGIHCYQDCYLAHQRLAIVDPTSGDQPLYNEDKSVVVTVNGEIYNHEELKANLKSHKFQTASDCEVIAHLYEEYGEEFVDMLDGMFAFVLLDTRDKSFIAARDAIGICPLYMGWGLDVCRIKILVLIYVPSKKFKVFVTGHEVGFFFDVISGSLFKAIIKRLMTDVPFGVLLSGGLDSSLVASVVSRHLAEAKVAAQWGNKLHTFCIGLKGSPDLRAAKEVADYLGTVHHELHFTVQEGIDALEEVIYHVETYDVTTIRASTPMFLMSRKIKSLGVKMVLSGEGSDEIFGGYLYFHKAPNKKEFHEETCRKIKALHLYDCLRANKSTSAWGVEARVPFLDKNFINVAMDIDPEWKMIKRDLGRIEKWVLRNAFDDEEKPYLPKHILYRQKEQFSDGVGYSWIDGLKDHANEHNAARLTVPGGPSVACSTAKAVEWDAAWSKNLDPSGRAALGVHDAAYEDTLQKSPASANPVLDNGFGPALGESMVKTVASATAV

SEQ ID NO: 18700 - protein, 239 aa, Oceanobacillus iheyensis HTE831
MKGMILARGKGTRLHPLTKVINKHLIPIGKYPMIYYPIFKLREVDITEILITTNQQDIPLFRELLGDGRDLGVRIHFEAQQQAIGIPDAILLSKTFVGSDKLTVILGDNIFHDSLIPYVQSYEKQSTGAKILLKTVSDPNRYGIATFDKSQKNILSIEEKPSDSSSNYCVTGIYMYGTEVFEFIKQITPSSRGELEITDVNNLYLQKSKLTFDVLPNWWIDAGTYDSIFQANQIILKNE

SEQ ID NO: 18701 - protein, 203 aa, Nitrosomonas europaea ATCC 19718
MNKIVIASNNAGKLAEISRLLAPLGIEVVTQSSLGVTEADEPHMTFVENALAKARHASLATGLPALADDSGICVSALRGDPGVFSARYAGEPRSDERNNRKLVEALHGQSDRRAYYYCVIVLLRHGQDPQPVIIEDTWRGEIIAEPIGQGGFGYDPHFFLPELGKTAAELSIEEKNRISHRGKALARLVQMLSENETVPVVPV

SEQ ID NO: 18702 - protein, 367 aa, Zea mays
MGSLASERKVVGWAARDATGHLSPYSYTLRNTGPEDVVVKVLYCGICHTDIHQAKNHLGASKYPMVPGHEVVGEVVEVGPEVAKYGVGDVVGVGVIVGCCRECSPCKANVEQYCNKKIWSYNDVYTDGRPTQGGFASTMVVDQKFVVKIPAGLAPEQAAPLLCAGVTVYSPLKHFGLTNPGLRGGILGLGGVGHMGVKVAKAMGHHVTVISSSSKKRAEAMDHLGADAYLVSSDAAAMAAAADSLDYIIDTVPVHHPLEPYLALLKLDGKLVLLGVIGEPLSFVSPMVMLGRKAITGSFIGSIDETAEVLQFCVDKGLTSQIEVVKMGYVNEALERLERNDVRYRFVVDVAGSNVEAEAAAADAASN

SEQ ID NO: 18703 - protein, 924 aa, Campylobacter jejuni subsp. jejuni NCTC 11168
MNRRDFIKNTAIASAASVAGLSVPSSMLGAQEEDWKWDKAVCRFCGTGCGIMIARKDGKIVATKGDPAAPVNRGLNCIKGYFNAKIMYGEDRLVMPLLRMNEKGEFDKKGKFQQVSWQRAFDEMEKQFKKAYNELGVTGIGIFGSGQYTIQEGYAALKLAKAGFRTNNIDPNARHCMASAVVGFMQTFGVDEPSGCYDDIELTDTIITWGANMAEMHPILWSRVSDRKLSNLDKVKVVNLSTFSNRTSNIADIEIIFKPNTDLAIWNYIAREIVYNHPEAMDMKFIKDHCVFATGYADIGYGMRNNPNHPKFKESEKDTVEKENVITLDDEEATSLSYLGVKAGDKFEMKHQGVADKNWEISFDEFKKGLAPYTLEYTARVAKGDDNESLEDFKKKLQELANLYIEKNRKVVSFWTMGFNQHTRGSWVNEQAYMVHFLLGKQAKPGSGAFSLTGQPSACGTAREVGTFSHRLPADMVVANPKHREISEKIWKVPAKTINPKPGSPYLNIMRDLEDGKIKFAWVQVNNPWQNTANANHWIAAAREMDNFIVVSDCYPGISAKVADLILPSAMIYEKWGAYGNAERRTQHWKQQVLPVGAAMSDTWQILEFAKRFKLKEVWKEQKVDNKLTLPSVLEEAKAMGYSEDDTLFDVLFANKEAKSFNPNDAIAKGFDNTDVKGDERKIQGSDGKEFTGYGFFVQKYLWEEYRKFGLGHGHDLADFDTYHKVRGLRWPVVNGKETQWRFNTKFDYYAKKAAPNSDFAFYGDFNKMLTNGDLIAPKDEKEHSIKNKAKIFFRPFMKAPERPSKEYPFWLATGRVLEHWHSGTMTMRVPELYRAVPEALCYMSEKDGEKLGLNQGDLVWVESRRGKVKARVDMRGRNKPPVGLVYVPWFDENVYINKVTLDATCPLSKQTDFKKCAVKIYKA

SEQ ID NO: 18704 - protein, 166 aa, Lactococcus lactis subsp. lactis
MAIIGILGTPYNTVERSPFWWNKVSYTRQSFIDVFQELGHTVIVLPVDKTENIKNYLPLVDKIVLTGGVDVSPYLYGEEPHAQLGTTDPIRDRFELAAIKAALEANKPILGVCRGLQLLNVYFGGTLYQDLSLTSSQIKHLQSPTPQEVPTHHISVEKESSFRFFT

SEQ ID NO: 18705 - protein, 395 aa, Ferroplasma acidarmanus
MKVSQYYTKKLSKFWGNRSLLLSRTLIGLAVGADSAIATAYIAEYAPKNRRGHLSLMQQWMITWGILGAYFVGMGVFFIAPQLAYTIDWRVLLGVAAIPSLIGLVFRFYMPESPRWLILHEKYDKAIASLKRFNVTAKLSEIKNTHDYLVAKETKQKATPGIKRAFVIVGLFMMFQQITGINIPFYYGPVVIAKLHIFGSTGGTAISSAVFGIEASSILAIINVLATLIGFRLIDSYGRRSLALLGYSGMAFFDVLGAVLYLSHIDIGLLIGFAGFIIFFAFGVGGTGWIIQGEYFPTQYRGLFASLIAVVDWISNFAIIELFPVMDLKIGLGYTMAVFAVLSIMAVVIFFYIMPKTKGKSVEEINDIFENNTLATVRNASMSGYSDNSKTDKKQ

SEQ ID NO: 18706 - protein, 230 aa, Methanococcoides burtonii DSM 6242
MVSLDESLVARLKKGSKHYEVLVDPDGALEFKKGGNVKIEDILAVESIFEDSGRGDHAAESDLTNAFQTDDVFEIAAYIIKHGEIQLTKEQRKHILEEKTRQVISTIARNAINPQTRAPHPPGRIEKAMEEAKVHIDPLKGVDEQVNIVMKAIRPIIPIRFEEVEIAVKIPSEYAGKSYGDIAKFGTMLRDNWENDGSWVAVVKIPAGMQNDFYGLVNHLTKGDAETKLL

SEQ ID NO: 18707 - protein, 321 aa, Zea mays
MPIRFYPCGPPCPSPDFPACALSLSLSLSLRRRRAWATCAAAPSPGLHRTLRQVLFRPIAGTEQLLHSFDFSYRIPHRGMLAKGRKVAGRREEMSANYAFGPQDDDAIIKHRLLTRTTTTRGEPPLKKLQKKFMSFATEIEKDADNISDCERLYKAFLHEINTFELPLLKSKAVVDANIREKESFNELQVEIERQILHAKTDIEDLKKQLEQSKIERQHKEECEAIRKLISLQPPRSETEKLIADLEKEITDLKAENVACIRTLELRKKQFALLLHVVEELQISIEDEQKSIADELRAIAGEQKMSMEEGSVGASDSMVVD

SEQ ID NO: 18708 - protein, 285 aa, Oryza sativa
MGRPPCCDKEGIKKGPWTPEEDIILVSYIQEHGPGNWRSVPINTGLMRCSKSCRLRWTNYLRPGIKRGNFTAHEEGIIVHLQSLLGNRWAAIASYLPQRTDNDIKNYWNTHLKKKLAAAANSTSSSNRHPIFADATFPSAAGASSSYASSMDNISKLLDGFMKTNSPSPPPPPLQHYDSGYYDDVKPAVDVGGNPLLSSFDCMSGADLDCCFDVHQQHQQQQPASFMEYGGYGGGYGDESKQQLMNQAAPPLSSIEKWLFDEAAAEQVADLMDLSDGCCSVPMMF

SEQ ID NO: 18709 - protein, 600 aa, Chlamydophila caviae GPIC
MKHLQQKIETLCNPITAKNILTWLSSDFGQNDRETIAELLENNPQHLEELFGKTLAFGTGGLRSPMGLGTNRINVFTVRRATQGLAQVLKKHNPHPGDPIRVVIGYDTRHCSFDFAQETAKVFAGNKIHALIFKDPEPLALVSFTLRSQEALAGVMITASHNPPEYNGYKVYMASGGQVLPPLDQEIIQASANVEEILVVDSLKDPYIHLIGEEYEALYTETVRQLQLYPEDNRISGQAIHVSYSPLHGTGVTMIPRVLRDWNFPMVKLVEKQALPDGNFPTVHLPNPEDPEALTLGIEQMIKNQDDIFIATDPDADRLGVVCLDENQPYIFNGNQIACLLADHILRAWSAQAPLGKEDKVVKSLVTTEMLSAITESYGGDIINVGTGFKYIGEKIEAWRGQLERYVFGAEESYGYLYGTHVEDKDAISTSALITEAALKQKLQGKTLREAILDLYETHGYFMNKTLSLSFEPGQESFMKSQIEKLAVLDPSTMSLTGYPVAAFENYRQGIGINIASGTTYKLHLPKMFMLCYYYQNGGKIIVRPSGTEPKIKLYFELVNHYDVVAKKKEERIQREQESQKKLEDFISEFKEKFSSLKPE

SEQ ID NO: 18710 - protein, 330 aa, Arabidopsis thaliana
MADTSSRTDVSTDGDTDHRDLGSDRGHMHAAASDSSDRSKDKLDQKTLRRLAQNREAARKSRLRKKAYVQQLENSRLKLTQLEQELQRARQQGVFISSSGDQAHSTGGNGALAFDAEHSRWLEEKNRQMNELRSALNAHAGDTELRIIVDGVMAHYEELFRIKSNAAKNDVFHLLSGMWKTPAERCFLWLGGFRSSELLKLLANQLEPMTERQVMGINSLQQTSQQAEDALSQGMESLQQSLADTLSSGTLGSSSSDNVASYMGQMAMAMGQLGTLEGFIRQADNLRLQTLQQMLRVLTTRQSARALLAIHDYSSRLRALSSLWLARPRE

SEQ ID NO: 18711 - protein, 310 aa, Oryza sativa (japonica cultivar-group)
MAYKINSHVGVRLIKQQQAPHVAVAAITAASSPTQPPPPRALPRPPPMASAAAPTTSSLSLAARRAAAVGPAAASPLRRGGLAAGCQPARSLAFAAAADPRLATHVASRCRQAASSSSRGTRAVATMAKKSVGDLTAADLEGKRVFVRADLNVPLDDNQNITDDTRVRAAIPTIQYLIKNGAKVILSSHLVTKAEDVIGPDVEKLVSELPNGSVLLLENVRFYKEEEKNDPEFAKKLASLADLYVNDAFGTAHRAHASTEGVTKFLKPSVAGFLLQKELDYLVGAVSSPKRPFAAIVGGSKVSSKIGVVV

SEQ ID NO: 18712 - protein, 647 aa, Brassica napus
MSSAPSPGTGSPPSPPSNSTTTTPPPASAPPPTTPSSPPPPSTIPTSPPPSSRSTPSAPPPSPPTPSTPGSPPPLPQPSPPAPTTPGSPPAPVTPPTRNPPPSVPGPPSNPSREGGSPRPPSSPSPPSPSSDGLSTGVVVGIAIGGVALLVIVTLICLLCKKKRRRDEEDAYYVPPPPPPGPKAGGPYGGQQQQWRQQNATPPSDHVVTSLPPPPKAPSPPRQPPPPPPPPFMSSSGGSDYSDRPVLPPPSPGLVLGFSKSTFTYEELARATNGFSEANLLGQGGFGYVHKGVLPSGKEVAVKQLKVGSGQGEREFQAEVEIISRVHHRHLVSLVGYCIAGAKRLLVYEFVPNNNLELHLHGEGRPTMEWSTRLKIALGSAKGLSYLHEDCNPKIIHRDIKASNILIDFKFEAKVADFGLAKIASDTNTHVSTRVMGTFGYLAPEYAASGKLTEKSDVFSFGVVLLELITGRRPVDANNVYVDDSLVDWARPLLNRASEQGDFEGLADAKMNNGYDREEMARMVACAAACVRHSARRRPRMSQIVRALEGNVSLSDLNEGMRPGQSNVYSSYGGSTDYDSSQYNEDMKKFRKMALGTQEYNATGEYSNPTSDYGLYPSGSSSEGQTTREMEMGKIKRTGQGYSGPSL

SEQ ID NO: 18713 - protein, 330 aa, Antirrhinum majus
MSLSCSDCFSDLLCGEDSNIIFSGGGDDLPEYTSDVESIPTDVDESIAGLLEDERDLAGVNSSSSNQSVDSSTRTESTAWILKVQRYYGFQPLTAYLAVSYFDRFLNAHHLPKLNGWPMQLLSVACLSLAAKMEESLVPSLLDLQVEGANFIFEPRNIQRMELLVLRVLDWRLRSISPFCYLSFFALKIDPTGTYTGFLTSRAKEIILSTVQETSLIEYRPSCIAAATMLSSANDLPKFSFITAQHAEAWCDGLHKDNIASCIKLIQGVESNNRPKKQPKVLPQLRVMTRASLASSESSSSTSSSPSYKRRKLNNSSRADDDKESSDYGV

SEQ ID NO: 18714 - protein, 444 aa, Glycine max
MATIVSIKARQIFDSRGNPTVEVDLTCSDGTFARAAVPSGASTGIYEALELRDGGSDYLGKGVSKAVDNVNTVIGPALIGKDPTEQTAIDNLMVQQLDGTVNEWGWCKQKLGANAILAVSLAVCKAGASVLKIPLYKHIANIAGNKKLVLPVPAFNVINGGSHAGNKLAMQEFMVLPVGASSFKEAMKMGVEVYHNLKSVIKKKYGQDAINVGDEGGFAPNIQENKEGLELLKTAIAKAGYTGKVVIGMDVAASEFYKEDKTYDLNFKEDNNDGSQRISGDALKDLYKSFVSEYPIVSIEDPFDQDDWEHYAKLTAEVGANVQIVGDDLLVTNPKRVQKAIDTKACNALLLKVNQIGSVTESIEAVRMSKKAGWGVMASHRSGETEDTFIADLSVGLATGQIKTGAPCRSERLAKYNQLLRIEEELGAEAVYAGANFRTPVEPY

SEQ ID NO: 18715 - protein, 359 aa, Nostoc sp. PCC 7120
MSKSRRIGILTSGGDCSGLNAVIRAVVHCASGKGWEVFGIRQATLGLMARPPQVSKLEIDQVDPLLTSGGTMLGTTNKGDPFAFPMPDGSFCDRSSEIIAGYHQLDLDALIGIGGDGSLAILRRLAQQGAINLVGIPKTIDNDIGITEHAIGFDTAVNIATEALDRLHFTAASHSRVMILEVMGRDAGHIALAAGIAGGADVILIPEILYSMDDICYHIKHRQEEGKNYCLIIVSEAVRTQDGEILTLTNRLGQSRYGGIGEYLADQISDRIGAETRVTVLGHIQRGGIASPLDRLVASAFGVAAVNLIEAAKYDYMVAWQNRQVITVPIEEAIAQYKAVNPEDALVKTARGLGIYLGE

SEQ ID NO: 18716 - protein, 144 aa, Escherichia coli
MIFLPLTVAEDDWAGWKILHGALGEQIELVGDDLFVTNVKYIQRGIDENLANSALIKLNQIGSLSETFDAVQLCHDNNWGTFISHRSGETVDSFIADMTVAMRAGHLKTGAPCRGERIEKYNQLMRIEDELGSSAQFAGKSAFK

SEQ ID NO: 18717 - protein, 532 aa, Oryza sativa
  unsure (1)..(532): unsure at all Xaa locations
MACVLRLASRSRSRSGLRPTLAAPRPSPVPPPPPRVGPTPAAPSPAPLRGLLLPLSPLRLASPDAFSSSSPSPAWLLDGLNWRRAGVGRRWFATEASAASTAAELVDVPLAQTGEGIAECELLRWFVTEGEHVGVPRAPGEVQSDKATIEITSRFKGKVHQIHFGPGDIVKVGETLLKMMVGDSQTVSHDSIASSTDHSHAVDAANPSGEGSVPSGTLSTPAVRHLAKQYGLNISDIQGTGKDGRVLKEDVLSYAASKGLCKEPTSALEENIDQVELLEGRGSLPDANSYEDRRISLRGYQRSMVKSMTLAAKVPHFHYLEEINCDALVELKASFQNANKDHTIKHTFLPFLIKSLSKALSKYKASFXPLLNSCFVEETNEVIFKGSHNIGVAMATEHGLVVPNIKNVQSLSILEITKELSRLHEMASHNRLSTEDIAGGTITLXATYGALGGKFGSPXLNLPEVALIAXLGRIQKLPRFDDDENVYPSSIINVTVGADHRVVDGATVARFCNEWEKPLWRSPERXLLLHMR

SEQ ID NO: 18718 - protein, 271 aa, Glycine max
MADYSARTESCEVVVNVTKDTSKTMEPSDSFVSVPFLQKLVAEVVGTYFLIFAGCASVVVNKNNDNVVTLPGIAIAWGLVVTVLVYTVGHISGAHFNPAVTIAFASTRRFPLMQVPAYVAAQLLGSTLASGTLKLLFMGKHDQFSGTLPNGTNLQAFVFEFIITFLLMFVISGVATDNRAVGELAGIAIGSTILLNVIIGGPVTGASMNPVRSLGPAIVHGEYRGIWIYLLAPVVGAIAGALVYNTIRYTDKPLSETTKSASFLKGRAASK

SEQ ID NO: 18719 - protein, 156 aa, Hevea brasiliensis
MCLSNLPASSEGVICVVVMNTALSISIFKGIVRSVLHIVDNRLAPFSSSSSSILFPDYSDTESFEFPLHSSDDCVRELRSRRPAKRFDAVSSCKQPQHDCPVCLIQFKPDSEINCLSCGHVFHKACLEKWLDYRKVTCPLCKSPVMPEEEDTSSSW

SEQ ID NO: 18720 - protein, 271 aa, Glycine max
MADYSAGTESQEVVVNVTKNTSETIQRSDSLVSVPFLQKLVAEAVGTYFLIFAGCASLVVNENYYNMITFPGIAIVWGLVLTVLVYTVGHISGGHFNPAVTIAFASTRRFPLIQVPAYVVAQLLGSILASGTLRLLFMGNHDQFSGTVPNGTNLQAFVFEFIMTFFLMFVICGVATDNRAVGEFAGIAIGSTLLLNVIIGGPVTGASMNPVRSLGPAFVHGEYEGIWIYLLAPVVGAIAGAWVYNIVRYTDKPLSETTKSASFLKGRAASK

SEQ ID NO: 18721 - protein, 327 aa, Bradyrhizobium japonicum USDA 110
MRAMVLAAPRARLRMEERPDPIPGEGQIRVRVSACGVCRTDLHVVDAELPDIRYPIVPGHEIVGRIDLVGPDVATHALGDRVGIPWLGFTCGNCRFCREGMENLCDRPLFTGYTRDGGYATHVVADARYAFPLGEAGDDVALAPLLCAGLIGWRSLVLAGQAERLGIYGFGAAGHIVAQVAVWQGRSVHAFTRRGDLAAQDLARRLGAVWAGASDEMPDTPLDAAIIYAPAGELVPAALRAVRKGGRVVCAGIHMSDIPSFPYDLLWQERQLISVANLTRQDGLDFLRIAPQAGVRTETTAFPLDQANEVLDMLRNGQILGAAVLRP

SEQ ID NO: 18722 - protein, 270 aa, Escherichia coli
LLLKTQLPSGSELSLYDIAPVTPGVAVDLSHIPTAVKIKGFSGEDATPALEGADVVLISAGVARKPGMDRSDLFNVNAGIVKNLVQQVAKTCPKACIGIITNPVNTTVAIAAEVLKKAGVYDKNKLFGVTTLDIIRSNTFVAELKGKQPGEVEVPVIGGHSGVTILPLLSQVPGVSFTEQEVADLTKRIQNAGTEVVEAKAGGGSATLSMGQAAARFGLSLVRALQGEQGVVECAYVEGDGQYARFFSQPLLLGKNGVEERKSIGTLSAF

SEQ ID NO: 18723 - protein, 542 aa, Escherichia coli O157:H7 EDL933
MIAVEKLLPTGEDFASHVYPCYTSHRKETIMTNNPPSAQIKPGEYGFPLKLKNRYDNFIGGEWVAPADGEYYQNLTPVTGQLLCEVASSGKRDIDLALDAAHKVKDKWAHTSVQDRAAILFKIADRMEQNLELLATAEAWDNGKPIRETSAADVPLAIDHFRYFASCIRAQEGGISEVDSETVAYHFHEPLGVVGQIIPWNFPLLMASWKMAPALAAGNCVVLKPARLTPLSVLLLMEIVGDLLPPGVVNVVNGAGGEIGEYLATSKRIAKVAFTGSTEVGQQIMQYATQNIIPVTLELGGKSPNIFFADVMDEEDAFFDKALEGFALFAFNQGEVCTCPSRALVQESIYERFMERAIRRVESIRSGNPLDSVTQMGAQVSHGQLETILNYIDIGKKEGADVLTGGRRKLLEGELKDGYYLEPTILFGQNNMRVFQEEIFGPVLAVTTFKTMEEALELANDTQYGLGAGVWSRNGNLAYKMGRGIQAGRVWTNCYHAYPAHAAFGGYKQSGIGRETHKMMLEHYQQTKCLLVSYSDKPLGLF

SEQ ID NO: 18724 - protein, 287 aa, Zea mays
MRTLKRFYIKRVQDLHKEVQVFEEKDLMKSLSKSTCVPEVLSTCADQSYLGILLNCCLCCSLASILHTPLNETSARFFAASVVVALEELHQKSIIYRGVSADILMLDRSGHLQLVDFRFAKKLEGQRTYTICGIADSLAPEIVLGRGHGFPADWWALGVLIYFMLQSDMPFGSWRESELEPITKIAKGHLVMPVSFSAEVVDLITKLLVVDENARLGTSGAEAVKKHPWFDGTDWERIASGTCAAPEEITERINYCIETLNEDLSASPSVPIEDPDDLTAPEWIQDW

SEQ ID NO: 18725 - protein, 440 aa, Arabidopsis thaliana
MYLDINGVMIKQFSFKASLLPFSSNFRQSSAKIHRPIGATMTTVSTQNESTQKPVQVAKRLEKFKTTIFTQMSILAVKHGAINLGQGFPNFDGPDFVKEAAIQAIKDGKNQYARGYGIPQLNSAIAARFREDTGLVVDPEKEVTVTSGCTEAIAAAMLGLINPGDEVILFAPFYDSYEATLSMAGAKVKGITLRPPDFSIPLEELKAAVTNKTRAILMNTPHNPTGKMFTREELETIASLCIENDVLVFSDEVYDKLAFEMDHISIASLPGMYERTVTMNSLGKTFSLTGWKIGWAIAPPHLTWGVRQAHSYLTFATSTPAQWAAVAALKAPESYFKELKRDYNVKKETLVKGLKEVGFTVFPSSGTYFVVADHTPFGMENDVAFCEYLIEEVGVVAIPTSVFYLNPGEGKNLVRFAFCKDEETLRGAIERMKQKLKRKV

SEQ ID NO: 18726 - protein, 439 aa, Ralstonia metallidurans CH34
MLSREDNELLVRVGPGTAMGTMMRLYWIPFLKSSEVTAGGQPYRVRLLGEDLVAFRDNSGNVGLVDHTCPHRGAPMVFGRNENDGLRCVYHGWKFKVSGQCEEMPCEPADSPMCKRMKIKAYPVKERNGILWAYMGPDAENAPELPDVEWNMVPEEQVAISMRVQECNWLQALEGELDSAHAAILHGRVGEGGVINQWRQAQDLSPTFECVQHDAGISIGARRKTPDGENYVRVNQFLMPFWTLVPPQSQFPELSGHAWVPIDDEHTLCLMFSYHPAKPFYERTRKLFKEGHNGRETGHHSDNAFEKRPVTEPYHTYWSKFNRGNAYQFDYQSQVEKYNSGMPGLWIQDAACQSGTTPILDRSKEHLGTSDTGVARMRRVLLEAVKKLVATGEHPVSSNAPAAFRWRAVSLTIPLGGDWTKLGEEAMRAEPGKDFGYTP

SEQ ID NO: 18727 - protein, 277 aa, Psychrobacter sp. 273-4
MSVLDNKKISFIGGGNMAQALISGMVSCGIKPNLITVSDPSSEAREQLAAKGLNTVDPMTDAKAAVIDADIVVLAVKPQVMKAVVSAFADVLDKQLVISVAAGLSTDVLSSMLGGYRNIVRAMPNTPAMIQMGATGLYGTDDISAEQKQLATAVMEASGLVMWVEDEAHMHAVTAVSGSAPAYMFYIIEAMVDGAVALGLDKEQASALAMQTMLGAAKMAMGSEDAPAELRRKVTSPNGTTQAAIESMQANDIGRQISEAMQACYDRSQALSEEMSK

SEQ ID NO: 18728 - protein, 640 aa, Corynebacterium efficiens YS-314
MCGLLGILSANGNAADYVPALQRALPCLHHRGPDEAGTWQDGDLAFGFNRLAIIDIAHSHQPLRWGPEGEPERYAMTFNGEIYNYIELREELTALGYAFETEGDGEPIMVGFHHWGADVVNHLRGMFAIAIWDTVDRSLFLARDQFGIKPLFYATTGVGTVFSSEKKAILEMAEELNLDLSLDRRAIEHYVDLQYVPEPETLHTGIRRLESGCTATIIPGGELVEKRYFTPRFPVKSVPKGREQDLFDRIARVLEDSVEKHMRADVTVGSFLSGGIDSTAIATLAKRHNPNLLTFTTGFEREGYSEVDVAAESAAAIGVEHIVKIVSPEEYANAIPKIMWYLDDPVADPSLVPLYFVAAEARKHVKVVLSGEGADELFGGYTIYREPLSLAPFEKIPTPLRRGLGRLSRVLPEGMKGKSLLERGSMTMEERYYGNARSFNFEQMQRVIPWARREWDHREVTAPIYAQSRDMDPVARMQHLDLFTWMRGDILVKADKINMANSLELRVPFLDKEVFKVAETIPYDLKIANGTTKYALRKAMEQIVPPHVLHRKKLGFPVPMRHWLAGDELFGWAQDTINESQTDEIFNKKAVLEMLNEHRAGVSDHSRRLWTVLAFMVWHGIFVENRIDPQIEQRDYPVEL

SEQ ID NO: 18729 - protein, 351 aa, Ferroplasma acidarmanus
MKGIILHGGAGTRLRPLTHTGPKQLIPIANKPMSQYVLEYLTDAGINDICMILGDISPEKVKDYYGDGSEFDCNIQYIDQGAPLGIANAVSLTSNFVGNDKFVVILGDNLIEGKIKTFMDKFEKSNYDAFIVLTKSMHPKDFGVAEFRDNKLINLIEKPENPPSNYVLTGIYFFTPLIFDYIKKLKPSWRNEYEITEAIQLLLKDNKNIGYDIIDGWWKDTGTVDDILAANMLILDRGKNIEERANVKGKVAIGKNVVLSDDSLIRGPAIIGDNTVIQDKTFIGPYTSIGDNCTIKKASIENSIIMDNSNIDTENTIVDSIIGENSVIMNANLLKPAGKRLLLGENSRIYI

SEQ ID NO: 18730 - protein, 379 aa, Yersinia pestis KIM
MEMIKTRAAVAWGPNQPLSVEEVDLMPPQKGEVLVRIVASGVCHTDAYTLSGADPEGVFPTILGHEGGGIVEAIGEGVTSVAVVDHVIPLYTPECGECKYCRSGKTNLCQAIRSTQGKGLMPDGTTRFSKNGQPIFHYMGTSTFSELTVVPEISLAKINKEAPLEEVCLLGCGVTTGMGAVMNTAKVKPGDTVAIFGLGGIGLSAVIGAQMAGASRIIGIDLNTSKFELARKLGATDLINPKDYDKPIQEVIVELTDGGVDFSFECIGNVNVMRSALECCHKGWGESVIIGVAGAGEEISTRPFQLVTGRVWRGSAFGGVKGRSELPGIVQQYLDGKFALNDFITHTMALDQINEAFDLMHEGKSIRSVIHFNHSSESK

SEQ ID NO: 18731 - protein, 232 aa, Zea mays
MCGGAIIFDYIPARRRVSTADFWPGSEADAEDIHASHSTDPQRAPPPRAKAKPGRRKNQYRGIRQRPWGKWAAEIRDPVKGVRVWLGTYPTAEAAARAYDRAARRIRGAKAKVNFPSDTSSSVTVPTAVSRSAAAAAAQAPAVLPLPKVEAQTQVSDEVKELSEELMAYENYMNFLGIPYMEGGTTAASATTAAASAAAAAGVAEESQVPAPAGLWSFEDYYYPPSLSLFTE

SEQ ID NO: 18732 - protein, 573 aa, Candida albicans SC5314
MCGIFAAYRQPEVEDFKSKALQYSKLIRHRGPDWSGNVVQNSTILCHERLAIVGLDSGAQPIVSPDGNFTLAVNGEIYNHIQLREQFPDYKFKSLSDCEPIIPLFTKYDIDAPKHLDGMFAWVLYDKKNDRIVAARDPIGITTLYMGKSSKSPKTRYFASELKCLIEECDEIFAFPPGHVYDSNTDEITRYFKPSWWDASKVPEQHVDFKKVRETLELAVRKRLMAEVPYGVLLSGGLDSSLIASIASRETKKAAQASFNPEGIDANKELSGVDDKGSLHSTGVFNQLHSFAIGLPGAPDLLAAEKVAHFIGTIHHSHTFTLEEGLDALDDVIYHLETYDVTTIRASTPMYLLSRKIKAQGVKMVLSGEGSDEIFGGYLYFANAPSAKEFHEECVKRVKNLHYADCLRANKSTMAWGLEARVPFLDKQFLEVCMNINPEDKLIQPGKIEKYILRKAFDTSDEPDVKPYLPEEILWRQKEQFSDGVGYSWIDGLKDTAEKMVSDEEFAHPKPEWGDDIPTTKEAYWYRCKFDKMFNGSKAAASTVMRWIPKAEWGCHADPSGRYAATHDHKVAQ

SEQ ID NO: 18733 - protein, 350 aa, Staphylococcus epidermidis ATCC 12228
MKAYEYLKPGHAQLTDKEKPTITSSTDAIIRIVKTTICGTDLHIIKGDTPEVKSHTTLGHEGIGIIEEIGDNVNNFKVGDKVIISCISSCGKCYYCKKGIYAHCENGGGWILGHLVNGTQAEYVKVPFADNSLYHAPSNLKEDALVMLSDILPTGYEIGVLKGKVKPGCTVAIVGAGPVGLAALLTAQFYSPSKIIMIDLDDNRLETAKEIGATHLINSKETETAIKKVKSLNPRGVDVAIEAVGIPQTFDLCQNLIGVDGTIANVGVHGLPVQLDIDKLWIKNINVTTGLVSGNTTEELLEALKSKIIQPEQLVTHYSKLSEIESAYDLFRNATDHKAIKLIIENDITI

SEQ ID NO: 18734 - protein, 284 aa, Oryza sativa
MAAPPQPVPAPAAASPEVFRLGFIGPGNLAESIARGVAASGVLPATAIRTAPHRRPERAEAFSSIGAHILETNAQVVDDSDVIVISVKPQIVRQVLVELKPLLSEEKLLVSIAAGIKMEDLQGWSGHRRFIRVMPNTPSAVGQAASVMCLGEMATENDENRVRSLFSAIGKVWTAEEKYFDAVTGLSGSGPAYIFLAIEAMADGGVAAGLPRDLALGLASQTVLGAATMVNKTGKHPGQLKDMVTSPAGTTITGIQELEKGAFRGTLINAVVAATKRCRELSQS

SEQ ID NO: 18735 - protein, 202 aa, Mycobacterium tuberculosis H37Rv
MHVTQSSSAITPGQTAELYPGDIKSVLLTAEQIQARIAELGEQIGNDYRELSATTGQDLLLITVLKGAVLFVTDLARAIPVPTQFEFMAVSSYGSSTSSSGVVRILKDLDRDIHGRDVLIVEDVVDSGLTLSWLSRNLTSRNPRSLRVCTLLRKPDAVHANVEIAYVGFDIPKTFVVGYGLDYDERYRDLSYIGTLDPRVYQ

SEQ ID NO: 18736 - protein, 113 aa, Zea mays
  unsure (1)..(113): unsure at all Xaa locations
GADQAVRQPFQSRFDLLLLLAGPNTTRLASKLARGPTVIMASSETAVAPFKGLKSAAGFPVSRRRTRSLGNLRNGGGIRSMQVWPAYGTKKFKTLSYLPPXLSTDNLLKQVDY

SEQ ID NO: 18737 - protein, 206 aa, Arabidopsis thaliana
MAAAAAKAAVVLPRPVTFVTGNAKKLEEVKAIIGNSIPFKSLKLDLPELQGEPEDISKEKARLAALQVDGPVLVEDTCLCFNALKGLPGPYIKWFLEKLGHEGLNNLLMAYEDKSAYALCAFSFSRGPGAEPLTFLGKTPGKIVPARGPTDFGWDPVFQPDGYDQTYAEMAKEEKNKISHRYKSLALVKSHFKEAGYVFQTDDGTI

SEQ ID NO: 18738 - protein, 79 aa, Zea mays
MAVTITWVKARQIFDSRGNPTVEVDVGLSDGSYARGAVPSGASTGIYEALELRDGGSDYLGLPLHAFQDSVLPLPPPML

SEQ ID NO: 18739 - protein, 240 aa, Zea mays
IRCNDSSFQLLKLEMFEFKKKKKKKAGPKSLPPSPQQPAHISLWRIEGRKEEMGGGMEVHKNRWIEEWNAGRENLEFNFRWTRRSLAVDGLFGLAVPILVYKGIVREFHTPDPPLGLGFFTAATVAGRSARPASWFPGTSVSVEEKPLAATKKGESMENRVWLRPRAESSSRSGAPARGALAAATAGRQEREDESLLPATRSIVSSSSSGDGARLNLISARVRAGTHGGRQTEEKKTRPK

SEQ ID NO: 18740 - protein, 570 aa, Escherichia coli CFT073
MSEKHPGPLVVEGKLTDAERMKLESNYLRGTIAEDLNDGLTGGFKGDNFLLIRFHGMYQQDDRDIRAERAEQKLEPRHAMLLRCRLPGGVITTKQWQAIDKFAGENTIYGSIRLTNRQTFQFHGILKKNVKPVHQMLHSVGLDALATANDMNRNVLCTSNPYESQLHAEAYEWAKKISEHLLPRTRAYAEIWLDQEKVATTDEEPILGQTYLPRKFKTTVVIPPQNDIDLHANDMNFVAIAENGKLVGFNLLVGGGLSIEHGNKKTYARTASEFGYLPLEHTLAVAEAVVTTQRDWGNRTDRKNAKTKYTLERVGVETFKAEVERRAGIKFEPIRPYEFTGRGDRIGWVKGIDDNWHLTLFIENGRILDYPGRPLKTGLLEIAKIHKGDFRITANQNLIIAGVPESEKAKIEKIAKESGLMNAVTPQRENSMACVSFPTCPLAMAEAERFLPSFIDNIDNLMAKHGVSDEHIVMRVTGCPNGCGRAMLAEVGLVGKAPGRYNLHLGGNRMGTRIPRMYKENITEPEILASLDELIGRWAKEREAGEGFGDFTVRAGIIRPVLDPARDLWD

SEQ ID NO: 18741 - protein, 430 aa, Staphylococcus aureus subsp. aureus MW2
MAFEFRLPDIGEGIHEGEIVKWFVKAGDTIEEDDVLAEVQNDKSVVEIPSPVSGTVEEVMVEEGTVAVVGDVIVKIDAPDAEDMQFKGHDDDSSSKEEPAKEEAPAEQAPVATQTEEVDENRTVKAMPSVRKYAREKGVNIKAVSGSGKNGRITKEDVDAYLNGGAPTASNESAASATSEEVAETPAAPAAVTLEGDFPETTEKIPAMRRAIAKAMVNSKHTAPHVTLMDEIDVQALWDHRKKFKEIAAEQGTKLTFLPYVVKALVSALKKYPALNTSFNEEAGEIVHKHYWNIGIAADTDRGLLVPVVKHADRKSIFQISDEINELAVKARDGKLTADEMKGATCTISNIGSAGGQWFTPVINHPEVAILGIGRIAQKPIVKDGEIVAAPVLALSLSFDHRQIDGATGQNAMNHIKRLLNNPELLLMEG

SEQ ID NO: 18742 - protein, 468 aa, Staphylococcus aureus subsp. aureus MW2
MVVGDFPIETDTIVIGAGPGGYVAAIRAAQLGQKVTIVEKGNLGGVCLNVGCIPSKALLHASHRFVEAQHSENLGVIAESVSLNFQKVQEFKSSVVNKLTGGVEGLLKGNKVNIVKGEAYFVDNNSLRVMDEKSAQTYNFKNAIIATGSRPIEIPNFKFGKRVIDSTGALNLQEVPGKLVVVGGGYIGSELGTAFANFGSEVTILEGAKDILGGFEKQMTQPVKKGMKEKGVEIVTEAMAKSAEETDNGVKVTYEAKGEEKTIEADYVLVTVGRRPNTDELGLEELGVKFADRGLLEVDKQSRTSISNIYAIGDIVPGLPLAHKASYEAKVAAEAIDGQAAEVDYIGMPAVCFTEPELATVGYSEAQAKEEGLAIKASKFPYAANGRALSLDDTNGFVKLITLKEDDTLIGAQVVGTGASDIISELGLAIEAGMNAEDIALTIHAHPTLGEMTMEAAEKAIGYPIHTM

SEQ ID NO: 18743 - protein, 474 aa, Prochlorococcus marinus subsp. pastoris str. CCMP1378
MPKFEKLNLPKEGELITFNQGKPNVPNNPIVPYIRGDGTGVDIWPATQLVLDEAIKKSYGDERKINWFKVYAGDEACEIYGTYNYLPQDTIEAIRHFGVAIKGPLTTPIGGGIRSLNVALRQIFDLYSCVRPCKYYSGTPSPHKNPQNLDVIVYRENTEDIYMGIEWEADDHTCIDLINHLNNVVIPNSKNLKNRSIPDGSGIGIKPVSKLGSQRHIRKAIEHAKRLSGNKKHVTLVHKGNIMKYTEGAFRDWGYELAVNEFRADCITERESWILDNIHKNPEITIENNARKIEPGYDKLTSNKKAFICEEIKEVIASISNSHGNNKWEELIMVDDRIADSIFQQIQTRPQEYSILATLNLNGDYVSDAAAAIVGGLGMAPGANIGDNSAIFEATHGTAPKHAGLNKINPGSVILSGVMMLEYFGWNEAAKLVTSGISKAIEEKKVTYDLARLMEPKVAPLSCSGFAEAIISNF

SEQ ID NO: 18744 - protein, 422 aa, Staphylococcus aureus subsp. aureus MW2
MTAEKITQGTEGLNVPNEPIIPFIIGDGIGPDIWKAASRVIDAAVEKAYNGEKRIEWKEVLAGQKAFDTTGEWLPQETLDTIKEYLIAVKGPLTTPIGGGIRSLNVALRQELDLFTCLRPVRWFKGVPSPVKRPQDVDMVIFRENTEDIYAGIEFKEGTTEVKKVIDFLQNEMGATNIRFPETSGIGIKPVSKEGTERLVRAAIQYAIDNNRKSVTLVHKGNIMKFTEGSFKQWGYDLALSEFGDQVFTWQQYDEIVEKEGRDAANAAQEKAEKEGKIIIKDSIADIFLQQILTRPAEHDVVATMNLNGDYISDALAAQVGGIGIAPGANINYETGHAIFEATHGTAPKYAGLNKVNPSSVILSSVLMLEHLGWQEAADKITDSIEDTIASKVVTYDFARLMDGAEEVSTSAFADELIKNLK

SEQ ID NO: 18745 - protein, 536 aa, Arabidopsis thaliana
MNAAVFSPSALSLPISFSKTRSSFLSRKKGVKGEFRVFAVFGDESGLVEKKSQWRPLFDVEDPRSKAPPYKGKFLDVNQAIEVARFDIQYLDWRARQDLLTIMILHDKVVDVLNRLAREYKSIGTVKKELAGLQEELSKAHQQVHISEARVSTALDKLAHMEELVNDRLLPGRVVTELDKPSSSTTASAVELDREKTNTGAKSLNVSGPVPPYSPHLKNFWYPVAFTADLKHDTMVPIECFEQPWVIFRGEDGKPGCVRNTCAHRACPLDLGTVNEGRIQCPYHGWEYSTDGECKKMPSTKLLKVKIKSLPCLEQEGMIWIWPGDEPPAPILPSLQPPSGFLIHAELVMDLPVEHGLLLDNLLDLAHAPFTHTSTFAKGWSVPSLVKFLTPTSGLQGYWDPYPIDMEFKPPCIVLSTIGISKPGKLEGKSTQQCATHLHQLHVCLPSSKNKTRLLYRMSLDFAPILKNLPFMEHLWRHFAEQVLNEDLRLVLGQQERMLNGANIWNLPVAYDKLGVRYRLWRNAVDRGDDKLPFSG

SEQ ID NO: 18746 - protein, 207 aa, Thermobifida fusca
MSRISTLVLATRNRKKIPELRSILGEVGLDIEVRSLDGYPDAPEVAETEATFTGNALLKARAIAEHTGLPAVADDSGLRVDALNGMPGVLSARWSGRFGAQHGDRDAANLELVLDQLADVPPERRGAEFVCAAALALPDGEEHVVEGVLRGSLTTEPRGKNGFGYDPIFVPEGYTQTTAEMSPEEKNAISHRGVAFRALAKKIRELG

SEQ ID NO: 18747 - protein, 567 aa, Corynebacterium efficiens YS-314
MAFSVEMPELGESVTEGTITQWLKAVGDTVEVDEPLLEVSTDKVDTEIPSPVAGVILEIKAEEDDTVDVGGIIAIIGEEGEEGAESTEAPAEQEEAPAEEAPKEEPKKQAPASSGAATDVEMPELGESVTEGTITQWLKAVGDTIEVDEPLLEVSTDKVDTEIPSPVAGTIVEILAEEDDTVDVGAVIARIGDANAAPAEDAPAEEEAPAQNEAPVEETPDVTKDEAKKVEQDEPKAEKAEKKSEPKAAPQKTNTDNVPYVTPLVRKLAEKHGVDLNSVKGTGIGGRIRKQDVLAAASGESAPAEKEAASAAPASAASTKSVDPEKAKLRGTTQKVNRIREITARKTVEALQISAQLTQLHEVDMTRVAELRKSNKPAFQEKHGVNLTYLPFFVKAVVEALVAHPNVNASYNAETKEMTYHASVNMSIAVDTPAGLLTPVIHNAQDLSLPEIAKAIVDLADRARNNKLKPNDLSGGTFTITNIGSEGALSDTPILIPPQAGILGTGAIVKRPVVITEDGIDSIAIRQMVHLPLTYDHQVVDGADAGRFMTTIKDRLETANFEGDLEL

SEQ ID NO: 18748 - protein, 450 aa, Erwinia carotovora subsp. atroseptica SCRI1043
MTKHYDYLAIGGGSGGIASINRAAMYGQKCALIEAKYLGGTCVNVGCVPKKVMWHAAQIAEAIHQYGPDYGFDTTVNQFNWGTLVKNRSAYIDRIHQSYDNVLGKNKVDVIHGFARFVDAHTVEVNGEKITADHILIATGGRPVHPNIPGAEYGIDSDGFFELDALPKRTAIVGAGYIAVEIAGVLNGLGSETHLFVRKHAPLRSFDPLIVDTLVEVMNTEGPTLHTESIPKAIVKNADGSLTLELENGQSQTVDCLIWAIGREPATDNLNLSVTGVGLNDKGYINVDKFQNTTVSGIYAVGDNTGAVELTPVAVAAGRRLSERLFNNKPDEHLDYSNIPTVVFSHPPIGTVGLTEPQAREQYGDDQVKVYKSAFTAMYTAVTQHRQPCRMKLVCVGKEEKIVGIHGIGFGMDEMLQGFAVAVKMGATKKDFDNTVAIHPTASEEFVTMR

SEQ ID NO: 18749 - protein, 147 aa, Juglans regia
VMVYKFHEDEHGEVVAESKRPDLDPYIGLHYPSTDIPQASRFLFKQNRVRMIVDCNATPVQVVQDEGLMQPLCLVGSTLRAPHGCHAQYMANMGSIASLAMAVIINGNDGETCWWEDCNGVVGLGCFAIITSARCISIPFSAIALQF

SEQ ID NO: 18750 - protein, 160 aa, Triticum aestivum
  unsure (1)..(160): unsure at all Xaa locations
MAPTVMASSATSVAPFQGLKSTAGLPVSRRSNGASLGSVSNGGRIRCMXVWPIEGIKKFETLSYLPPLSTEALLKQVDYLIRSKWVPCLEFNKXGFNXPLTTTQXLGYYDGRYWDNVESLPXFRVXPNAKXNXFKQGXXEVKKRXYPDPXCPESPEPHAL

SEQ ID NO: 18751 - protein, 270 aa, Shigella flexneri 2a str. 2457T
MKSLFKVTLLATTMAVALHAPITFAAEAAKPATTADSKASFKNDDQKSAYALGASLGRYMENSLKEQEKLGIKLDKDQLIAGVQDAFADKSKLSDQEIEQTLQAFEARVKSSAQAKMEKDAADNEAKGKEYREKFAKEKGVKTSSTGLVYQVVEAGKGEAPKDSDTVVVNYKGTLIDGKEFDNSYTRGEPLSFRLDGVIPGWTEGLKNIKKGGKIKLVIPPELAYGKAGVPGIPPNSTLVFDVELLDVKPAPKADAKPEADAKAADSAKK

SEQ ID NO: 18752 - protein, 388 aa, Staphylococcus epidermidis ATCC 12228
MNIGIDKISFYVPKYYVDMAKLAEARQVDPNKFLIGIGQTEMTVSPVNQDIVSMGANAAKDIITEEDKKNIGMVIVATESAIDNAKAAAVQIHHLLGIQPFARCFEMKEACYAATPAIQLAKDYLAQRPNEKVLVIASDTARYGIHSGGEPTQGAGAVAMMISHNPSILKLNDDAVAYTEDVYDFWRPTGHQYPLVAGALSKDAYIKSFQESWNEYARRHNKTLADFASLCFHVPFTKMGQKALDSIINHADETTQDRLNSSYQDAVDYNRYVGNIYTGSLYLSLISLLETRDLKGGQTIGLFSYGSGSVGEFFSGTLVDGFKEQLDVERHKSLLNNRIEVSVDEYEHFFKRFDQLELNHELEKSNADRDIFYLKSIDNNIREYHIAE

SEQ ID NO: 18753 - protein, 501 aa, Glycine max
MPATPFSCSFLTLQPRFNSYVNPIFRSLTFQLSSSPLPFNANFSSVRLHSSLSRAAETDSPTGGRSGALTPGPAVAGEVQKIDVNPPKGTRDFPPEDMRLRNWLFNHFKEVSRLYGFEEVDYPVLESEALFTRKAGEEIKDQLYCFEDRGNRRVALRPELTPSLARLVIQKGKSVSLPIKWFTVGQCWRYERMTRGRRREHYQWNMDIIGVPGVMAEAELIASIVTLFKRIGITESDVGFKVSSRKVLQEVLNCYSVPENLFGKVCVIIDKIEKIPADEIKKELKAVGLSQEAVQELLQVLSVKSLTELEERLGSSGEAVADLKQLFSLAEKIGYSKWLQFDASVVRGLAYYTGIVFEGFDREGKLRAICGGGRYDHLFSTFGADDIAACGFGFGDAVIVELLKEKGLLPELNLQIDDIVCALDEDLQGCAAMVANILREKGQIVELVLESKPLKWVFKRAARLNAERLVLVGNSEWQRGVVGVKILSTAEQYEVKLDDLK

SEQ ID NO: 18754 - protein, 463 aa, Methanocaldococcus jannaschii
  unsure (1)..(463): unsure at all Xaa locations
MFIDGKWINREDMDVINPYSLEVIKKIPALSREEAKEAIDTAEKYKEVMKNLPITKRYNILMNIAKQIKEKKEELAKILAIDAGKPIKQARVEVERSIGTFKLAAFYVKEHRDEVIPSDDRLIFTRREPVGIVGAITPFNFPLNLSAHKIAPAIATGNVIVHHPSSKAPLVCIELAKIIENALKKYNVPLGVYNLLTGAGEVVGDEIVVNEKVNMISFTGSSKVGELITKKAGFKKIALELGGVNPNIVLKDADLNKAVNALIKGSFIYAGQVCISVGMILVDESIADKFIEMFVNKAKVLNVGNPLDEKTDVGPLISVEHAEWVEKVVEKAIDEGGKLLLGGKRDKALFYPTILEVDRDNILCKTETFAPVIPIIRTNEEEMIDIANSTEYGLHSAIFTNDINKSLKFAENLEFGGVVINDSSLFRQDNMPFGGVKKSGLGREGVKYAMEEMSNIXTIIISK

SEQ ID NO: 18755 - protein, 88 aa, Capsicum annuum
MSQDLKKVKQEDDQLKDSLPPAKREVNRCSGCRRKVGLTGFRCRCGELFCGEHRYSDRHDCSYDYKTAGREAIARENPVVKAAKIIKV

SEQ ID NO: 18756 - protein, 498 aa, Nostoc sp. PCC 7120
MKTPLNCQNYINGQWLNAATETTLNSHNPADKSEIVATFPRSQADDVDRAVAAARQAYGSWRKVPAPARAEYIFRVGELLLQHKEELAQLISREMGKPLTEARGDVQEGVDCAFYSAGEGRRLFGQTTPSEMPNKFAMTMRMPIGVCALITPWNFPVAIPCWKAMPALVCGNTVILKPAEDTPACATKLIEIFAAAGLPPGVINLVHGVGEEVGKALVEHPNIDLVSFTGSSATGAYVGETCGRTHKRVCLEMGGKNAQVVMEDADLELALDGALWGAFGTTGQRCTATSRLILHRDIKEKFTTMLRERTSQLRLGAGTEPETDIGPIINNRQLQRVHEYMNIAREEGAKILIGGEIATEGQLQQGYFFQPTILDNVTPQMRVAREEIFGPVVALIEVSTFEEAIAILNDTKYGLSSSVYTRDINRAFVAMRDIEAGITYINGPTIGAEVHLPFGGVKQTGNGHREAGTTALDVFTEWKSVYVDFSGSLQRAQIDNRS

SEQ ID NO: 18757 - protein, 307 aa, Staphylococcus aureus subsp. aureus MW2
MNAAVRAVVRTAIYNEIEVYGVYHGYQGLLNDDIHKLELGSVGDTIQRGGTFLYSARCPEFKEQEVRKVAIENLRKRGIEGLVVIGGDGSYRGAQRISEECKEIQTIGIPGTIDNDINGTDFTIGFDTALNTIIGLVDKIRDTASSHARTFIIEAMGRDCGDLALWAGLSVGAETIVVPEVKTDIKEIADKIEQGIKRGKKHSIVLVAEGCMTAQDCQKELSQYINVDNRVSVLGHVQRGGSPTGADRVLASRLGGYAVDLLMQGETAKGVGIKNNKIVATSFDEIFDGKDHKFDYSLYELANKLSI

SEQ ID NO: 18758 - protein, 179 aa, Triticum aestivum
  unsure (1)..(179): unsure at all Xaa locations
QVLRLATQPSILVAATTTTTTTTIQSVKARQIFDSRGNPTVEVDIGLSDGSFXRGAVPSGASTGIYEALELRDGGSDYLGKGVLXAVNNVNAIIGPALIGKDPTEQTDIDNFMVQQLDGTSNEWGWCKQKLGANAILAVSLAVCKAGAMVKKIPLYQHIANLAGNKTLVLPVPAFNVIN

SEQ ID NO: 18759 - protein, 236 aa, Triticum aestivum
  unsure (1)..(236): unsure at all Xaa locations
MEEGRDEKEATSENSEDRGNTSDSSRCDGSGLMSVQFMQKILAEILGTYFMILAGCGAVVVNQSTGGAVTFPGICVVWGLVVMVMVYSVGHVSGAHFNPPLAIAFATCRRFPWKQVPSYVLAQVLGSTLASLTLRLTFGGAHGHSLGTTPSGSSTQAVALEFIISFYLMFVVSGVATDDRAVGELAGLAVGATVVLNVLFAGPITGASMNPARSLGPAIVACQFXAVWVYIVGPVC

SEQ ID NO: 18760 - protein, 481 aa, Mesorhizobium loti MAFF303099
MALACCGATKRSGAEGRGTMDYDMLVIGSGPSGRRAAVQSAKLGKSVLVVDRGRRLGGVSVHTGTIPSKTLRETVLNLSGWRERGFYGRGYRVKQDISVGDLIERLHKTLDHEVEVLQHQFMRNTVKSARAAVKFLGPNKVSLTSDNGDYSEVGFANALIAVGTRPHRPRDVPFDKTRIFDSDEMLEIDRLPRTLTVIGGGVIGVEYATIFSALDVPVTLVEPRNSILDFVDREIVDDFIHQMRDRGMTIRLGSAVKEIRSKPEAAEVELADGRTIRSEVVLYAAGRTGNVGSLGLDVVGIDADSRGRIKVDPQTFQTNVPNIYAAGDVIGFPSLASTSMEQGRVAACHAFGVTLPPPPETFPYGIYAVPEISTVGQSEEQVRESGAAYEVGVARFRETSRGHIMGVNTGFLKLLFSIETRRLLGAHIVGEGATELIHIGQAVINLGGTVDFFVNNTFNYPTLAEAYKIAGLDAWNRMGRG

SEQ ID NO: 18761 - protein, 261 aa, Bradyrhizobium japonicum USDA 110
MGRLQGKSVIITGAGSGIGRAAALLFTREGARLIAVDRTEAMKETVEEVKKAGGVAEAMVADAGSEKDVIAVIDRAVKTHGRLDVIWANAGVSGGLIPLGEQTVEHWQEVLRVNLIGPFLAVKHAMPHMVKQQSGAIVLTASVAGLKAGASGHPYAASKAGVISLVQTTAYSLSGTGVRINAVCPGLIETGMTKPIFDRAKERGTADKIGQLNPLKRPGQPHELAAMGLFLASDEASYVNGQAFPVDGGLTASMPYAGKPV

SEQ ID NO: 18762 - protein, 514 aa, Escherichia coli O157:H7 EDL933
MSVSKKPMVLVILDGYGYREEQQDNAIFSAKTPVMDALWANRPHTLIDASGLEVGLPDRQMGNSEVGHVNLGAGRIVYQDLTRLDVEIKDRAFFANPVLTGAVDKAKNAGKAVHIMGLLSAGGVHSHEDHIMAMVELAAERGAEKIYLHAFLDGRDTPPRSAESSLKKFEEKFAALGKGRVASIIGRYYAMDRDNRWDRVEKAYDLLTLAQGEFQADTAVAGLQAAYARDENDEFVKATVIRAEGQPDAAMEDGDALIFMNFRADRAREITRAFVNADFDGFARKKVVNVDFVMLTEYAADIKTAVAYPPASLVNTFGEWMAKNDKTQLRISETEKYAHVTFFFNGGVEESFKGEDRILINSPKVATYDLQPEMSSAELTEKLVAAIKSGKYDTIICNYPNGDMVGHTGVMEAAVKAVEALDHCVEEVAKAVESVGGQLLITADHGNAEQMRDPATGQAHTAHTNLPVPLIYVGDKNVKAVAGGKLSDIAPTMLSLMGMEIPQEMTGKPLFIVE

SEQ ID NO: 18763 - protein, 159 aa, Zea mays
  unsure (1)..(159): unsure at all Xaa locations
MAAAARAIICELAPQKVSSTASGPAAPKKRDAGTKVVLQPRLCTLRSYGAGSGVVTRRILAGEEDGSGAADLGGSAALPFFASLADYIESSRKSQDFETISGRLAMVAFAAAMTVQTTTGSSLLKKLDTMKIEDAAXMCVAVVDSAAAFAWASSARNRI

SEQ ID NO: 18764 - protein, 388 aa, Ajellomyces capsulatus
MFSLRTAQPAQSLFRAATNTYSTSLPRSAIAARSFATVQSDIFKPTKYGGKYTVTLIPGDGIGTEVAESVKTIFKADNVPIEWEQVDVSGLDAGNKHSEDLFKESIASLKRNKLGLKGILHTPVERSGHQSFNVALRQELDIYASIVLIKNIPGYKTRHDNVDLCIIRENTEGEYSGLEHQSVSGVVESLKIITRAKSERIAKFAFSFALANNRKKVTCIHKANIMKLADGLFRSTFHKVAESYPTLETNDMIVDNASMQAVARPQQFDVMVMPNLYGGILSNVGAALVGGPGIVPGCNMGRDVAVFEPGCRHVGLDIKGKDQANPTALILSGSMLLRHLGLDEHANRISKAVYDVIGEGVTRTRDMGGQASTHEFTRAVLDKMESAL

SEQ ID NO: 18765 - protein, 194 aa, Corynebacterium glutamicum ATCC 13032
MADHKDLNVPANPYGTDIESVLISEEKLKQRIAEMAKRVSEEFKDAEEDLILVCVLKGAFYFLADFSRMLDIPTQSEFMAVSSYGNSTSSSGVVRILKDLDKEIEGRDVLIVEDIIDSGLTLSWLMRNLKNRNPKSLNVITLLRKPERLTTNIDMFDIGFDIPNEFVVGYGLDFAERYRDLPYVGTLEPHVYSD

SEQ ID NO: 18766 - protein, 148 aa, Oryza sativa (japonica cultivar-group)
MSKSGGAAAGPTAAAAAAAVQKQKTLLQKADADVSSLVDNFAALINIARVNDPPVRNTQEAFQMDMRGSRMVHSADSLLKLVSELKRTAIFSGLASLTENVDRRIEIFSQQVEGTERMLERIGQEAAGSLKELEAHYYSSVVRTPPDE

SEQ ID NO: 18767 - protein, 558 aa, Mycobacterium tuberculosis CDC1551
  unsure (1)..(558): unsure at all Xaa locations
MSFLVVVPEFLTSAAADVENIGSTLRAANAAAAASTTALAAAGADEVSAAVAALFARFGQEYQAVSAQASAFHQQFVQTLNSASGSYAAAEATIASQLQTAQHDLLGAVNAPTETLLGRPLIGDGAPGTATSPNGGAGGLLYGNGGNGYSATASGVXGGAGGSAGLIGNGGAGGAGGPNAPGGAGGNGGWLLGNGGIGGPGGASSIPGMSGGAGGTGGAAGLLGWGANGGAGGLGDGVGVDRGTGGAGGRGGLLYGGYGVSGPGGDGRTVPLEIIHVTEPTVHANVNGGPTSTILVDTGSAGLVVSPEDVGGILGVLHMGLPTGLSISGYSGGLYYIFATYTTTVDFGNGIVTAPTAVNVVLLSIPTSPFAISTYFSALLADPTTTPFEAYFGAVGVDGVLGVGPNAVGPGPSIPTMALPGDLNQGVLIDAPAGELVFGPNPLPAPNVEVVGSPITTLYVKIDGGTPIPVPSIIDSGGVTGTIPSYVIGSGTLPANTNIEVYTSPGGDRLYAFNTNDYRPTVISSGLMNTGFLPFRFQPVYIDYSPSGIGTTVFDHPA

SEQ ID NO: 18768 - protein, 97 aa, Zea mays
  unsure (1)..(97): unsure at all Xaa locations
MAVTITWVKARHIFYSRCNPTVLVDVCLIYGSYSRGVLPIGAFTGIYDALQLRDXGSDYLGTGVLKAVSNVNYIFGPSIVVKDLTEQVEIYNFMVHH

SEQ ID NO: 18769 - protein, 437 aa, Corynebacterium glutamicum ATCC 13032
MPKYDNSNADQWGFETRSIHAGQSVDAQTSARNLPIYQSTAFVFDSAEHAKQRFALEDLGPVYSRLTNPTVEALENRIASLEGGVHAVAFSSGQAATTNAILNLAGAGDHIVTSPRLYGGTETLFLITLNRLGIDVSFVENPDDPESWQAAVQPNTKAFFGETFANPQADVLDIPAVAEVAHRNSVPLIIDNTIATAALVRPLELGADVVVASLTKFYTGNGSGLGGVLIDGGKFDWTVEKDGKPVFPYFVTPDAAYHGLKYADLGAPAFGLKVRVGLLRDTGSTLSAFNAWAAVQGIDTLSLRLERHNENAIKVAEFLNNHEKVEKVNFAGLKDSPWYATKEKLGLKYTGSVLTFEIKGGKDEAWAFIDALKLHSNLANIGDVRSLVVHPATTTHSQSDEAGLARAGVTQSTVRLSVGIETIDDIIADLEGGFAAI

SEQ ID NO: 18770 - protein, 145 aa, Zea mays
MATRPAAEGKPWELAAHPRLPKGRTVAVVVLDGWGEAAPDPFNCIHVADTPTLDALKKAAPERWRLIKAHGTAVGLPTDDDMGNSEVGHNALGAGQIYAQGAKLVDLALGSGKIYEGEGFKYIQQSFQDGTLHLIGLLSDGGVHS

SEQ ID NO: 18771 - protein, 475 aa, Haloferax volcanii
MVVGDIATGTELLVIGAGPGGYVAAIRAAQNGIDTTLVEKDAYGGTCLNYGCIPSKALITGANLAHEAGNAEEMGIHADPVVDMSQLRDWKSGVVDQLTGGVEKLCKANGVNLVEGTARFKDENAVRIAHGGEGQGSETIEFEHCIIATGSRVIQIPGFDFGDEPVWSSRDALEADTVPERLVVVGGGYIGMELSTTFAKLGADVTVVEMLDDILPGYESDVARVVRKRAEELGIDMHLGEGATGWREEDDGIMVTTETEDGEENEYRADKVLVAVGRSPVTDTMDIENAGLEADDRGFLSVDDRRRTDVEHIYAVGDVVEDTPMLAHVASKEGIVAAEHVAGEPVAFDSQAVPAAVFTDPEIGTVGMTEADAEEAGFTPVVGQMPFRASGRALTTNHADGFVRVVADEESGFVLGAQIVGPEASELIAELAFAIEMGATLEDVASTIHTHPTLAEAVMEAAENALGQAIHTLNR

SEQ ID NO: 18772 - protein, 412 aa, Escherichia coli CFT073
MPQQNYLDELTPAFTPLLAIKEASRCLLCHDAPCSQACPAQTDPGKFIRSIYFRNFKGAAETIRENNALGAVCARVCPTEKLCQSGCTRAGVDAPIDIGRLQRFVTDFEQQTGMEIYQPGTKTLGKVAIIGAGPAGLQASVTLTNQGYDVTIHEKEAQPGGWLRNGIPQFRLPQSVLDAEIARIEKMGVTIKCNNEIGKTLTLEQLKAENRAVLVTVGLSSGSGLSLFEHSDVEIAVDFLQRARQAQGDISIPQSALIIGGGDVAMDVASTLKVLGCQAVTCVAREELDEFPASEKEFTSARELGVSIIDGFTPVAVEGNKVTFKHVRLPGELTIAADKIILAVGQHAELAVFSALEPQRNTIETQHYQTRDPQVFAAGDIVEGDKTVVYAVKTGKEAAGAIHHYLEGACSC

SEQ ID NO: 18773 - protein, 352 aa, Rhodococcus sp. TK6
MRVFAVQPDDTAIHDLEVPTPSPEGRQVLLKVVRAGVCHTDTHLRAGGYDLGSRGMMSMKARGIEYPMVLGHEVVGVVEKVGDSVESVRVGDVRLIYPWIGCGECRQCREGHDNRCAAGKNLGVARHGGYAEYILVPDEKYLVDIDGLDPSWAATLACSGLTAYSAVDKVLPLEPDEPVVVFGAGGLGLTAIAILRSRGHRNICAVDVAERNLALAQDMGASSTVLSGPGSGADDIRRAAGGPASAVIDFVNNGVTATAAFEVLAKAGIMVQVGLFGGEVTLPTALLALRMIRIEGSFVGTPAQMQELVRLAQRGALPHIPLVERPLSAAAVSQALDDLTAGGVAGRIVLTA

SEQ ID NO: 18774 - protein, 586 aa, Zea mays
MCGILAVLGVVEVSLAKRSRIIELSRRLRHRGPDWSGLHCHEDCYLAHQRLAIIDPTSGDQPLYNEDKTVVVTVNGEIYNHEELKAKLKTHEFQTGSDCEVIAHLYEEYGEEFVDMLDGMFSFVLLDTRDKSFIAARDAIGICPLYMGWGLDGSVWFSSEMKALSDDCERFITFPPGHLYSSKTGGLRRWYNPPWFSETVPSTPYNALFLREMFEKAVIKRLMTDVPFGVLLSGGLDSSLVASVASRHLNETKVDRQWGNKLHTFCIGLKGSPDLKAAREVADYLSTVHHEFHFTVQEGIDALEEVIYHIETYDVTTIRASTPMFLMSRKIKSLGVKMVISGEGSDEIFGGYLYFHKAPNKKEFLEETCRKIKALHLYDCLRANKATSAWGVEARVPFLDKSFISVAMDIDPEWNMIKRDLGRIEKWVMRKAFDDDEHPYLPKHILYRQKEQFSDGVGYNWIDGLKSFTEQQVTDEMMNNAAQMFPYNTPVNKEAYYYRMIFERLFPQDSARETVPWGPSIACSTPAAIEWVEQWKASNDPSGRFISSHDSAATDHTAVSRRWPTAAARPANGTVNGKDVPVPIAV

SEQ ID NO: 18775 - protein, 585 aa, Prochlorococcus marinus subsp. pastoris str. CCMP1378
MTQIDSKKKFDRLRLCKLLETIYKEHTTEELNLICNQLLQILDNFSEKSRYEEISEDKKWDESFAVLITYADGVYKKGETTLVTLRELLSKNFGSLSKVVHILPFLKSTSDGGFAVSSHTSLEEKFGSWEDLKSISNKHYLMADLVLNHVSSSHPWVQQFIKCQEPGLSNVFSPSQDLDWKNVIRPRSSSLFSQINTDDGQKQVWTTFGPDQIDLNWLNPKMTIEFLNLIITYLSNGIKWLRLDAVGFIWKEPGTTCLHLSKAHSIVKILRILLNDLLKDGVLITETNVPQKENLSYLLPEDEADMAYNFPLPPLLLEAIISSRADILNAWICDWPELPKTTTLFNFTASHDGVGLRALEGLMNEQRIKDLLINCEKRGGLVSHRRLSNGEDKPYELNISWWSAMEDPGRDSNRYQYERFLLTQLLVMSLKGVPAFYLPALLASENDIKSFSMTGQRRDLNREKFKSEKLAAVFNNPESNANKNLKYLRHAMDVRAKLPQFHPQSHMECLSKNRADIVALKRGIGSKAVFTIHNMTENKINYRFIDYEFNKLIKNDLNMQDYLTSNKYNSNNIELDPFQVIWLGF

SEQ ID NO: 18776 - protein, 306 aa, Campylobacter jejuni subsp. jejuni NCTC 11168
MNAAFIFPGQGSQSLGMGKDFYENSIKAKELLQNASDFCKIDFKHLLFEENEKLNQSEFTQPAIVLNSLMAYSVLLEKKPDLSSKFALGHSLGEFSALAVNGAFDFLEALSLVNKRGLFMQEDCAKVEAGMMVVLGLDDEKVEELCQKAQKENKQIFAANYNCDGQIVVAGLKPDLASYESVFKEAGAKRAMLLNMSVASHCPLLENASAKLCVELEKVLKPNFKAVISNANAKIYTSKEEALELLKAQLISPVLYKQSIKACENEVDYFIEFGASVLKGLNKKITSKETYALTNMNDIDEFLKVV

SEQ ID NO: 18777 - protein, 476 aa, Taxus x media
MASPQENVGILAMEVYFPTTCVQQDALETFDGVSKGKYTIGLGQDCMTFCTDLEDVISMSLTVVTSLLEKYAIDPKQIGRLEVGSETVIDKSKSIKTWLMCIFEKCGNTEIEGVDSTNACYGGTAALFNCVNWVQSSSWDGRYGLVVATDSAVYAEGPARPTGGAAAIAMLIGPNAPIAFENRYRGTHMAHAYDFYKPNLASEYPVVDGKLSQTCYLKALDSCYKRFCNKFEKGEGHQFSLLDADYVAFHSPYNKLVQKSFARLLFNDFSRHASSAGKDAQEKLEPYAGLSEEESYSSRDLEKVSQQAAKPLYDEKVQPSTLLPKKEGNMYTASLYAALASIIHNKYSTLEGQRVLMFSYGSGLASTMFSLKIREGQHPFILSNIAEAMDLQSKLESQHEFSPEDFVDNLRLMETLYGAKDFVSCAQHNLLRPGTFYLTEVDSMYRRFYSQKLVSLDDNCRETKFANGTISSNGEL

SEQ ID NO: 18778 - protein, 1047 aa, Pirellula sp. 1
MKKRTARLALFLAILGGPSAMAADFDVSNHNDSGAGSLRAAIEGLNGAGTGTHAINFASGLDPINLLSHLPTIVGTDQTITVNGAGNTVSGQDTARLFFVADGDVTFQNMTLKQGYAEGGDGGNSGGGGGGGAGAGGALFVNTGANVVISGVAFDSNKAEGGDGGDHDSSSDAGGGGGGFSGTGGSTSHDGGGGGGGFDGNGGIAHYYGGGGGGGVSGNGGDTSGDGGGGGGGIGNGASTSDDTGGDGDGGAAGGGDGDPGATGTPGGGGGGHQGAGGDGAVNGGGGGSGFAGSVAGNGGTFGGGGGGGGSTDGGDGGDFGGGGGGGFLGAGGDGGDFGGGAGTGYNGGSTGGSGGFGGGDGGRYSFGGDAGDAMGGAIFVREGGTLSIIDSTFTNNGLIAGTGGAGDTAPEDGANGQAIGSGMYLHTGVTAGYQVNTGTLTLADDIGGSGSLNKTGTGELVLSGTNTYTGTTTVSAGRLVVNGSLAGNTTVDTNSELGGSGTINGDVINNGTFAAGNSIGTMTIGGNASFNSGSTTEVEIQASATPIAGTDNDLITADTATINGGDVSVLGAVGSYTNGAKYTFLQTTHGLSGTFDTITDDLAFFDAQLGYDANSAFFTLMANSTDYASVGGSGNRQTVGFYIDENSIGASGDFGSVLDEFRVLTNAQVQSGLSQLSGEVYGSQSQVVIQGTNQLVGTIGGQLRSGMFGGGSGGSGSSGSGFVNATRSTRPSVTGSSSDIALVSYVNASSTQTPCDALIAPTCHAAYHWKGWMTGYGLGGSAESDGNAAGIHYGLGGTTFGIERYLGDNARLGFFGGYVGSSVSADSMDQTVRANGGNFGSYLTHSAGSHYGIAMGGLQFDGYESDRTIQVGALTRTASGESDGWQGFAYGERGMNLNLSRSRVLQPFAGLQYVYARQNAFTETGAGAMNLAMSGVDTHSLRSNLGTRLQWQSWMSRRGWAITPEIRGSWMHEFLDTTSVVNAQFAGVGGAGYTANGLDLGRDWAILGGGFEARPSDRWELRADYNTQFNENQVLHIGSGTLAYRW

SEQ ID NO: 18779 - protein, 146 aa, Oryza sativa (japonica cultivar-group)
MRGVGGPLLTIGDLLSDLAVDGGADLAGGEVSVPSSPSSAGQQAEEADPSELNRLFGEHYDNLMKALQENDPSWPSLMLKLCTALKTADKLVSCASIDAEQLLQKVELLERLLVRGDRAVTAIVEELQRSRPSEDSHSSKSKPSGK

SEQ ID NO: 18780 - protein, 391 aa, Staphylococcus epidermidis ATCC 12228
MRRHSMEMSERLASIPDSYFGKTMGRIVEHGPLPLINMAVGIPDGETPKGIINHFSEALCIPENQKYGPFHGKDAFKQAIVNFYQRHYDVELDKEDEVCILYGTKNGLVALPTCVVNPGEIVLLPDPGYTDYLAGVMLADAKPLPLKLSPPNYLPNWNTISAKVLEKTKLIYLTYPNNPTGSTATQDDFDEAIHRFKGTQTKIVHDFAYSAFGFDAKNPSILASKNAKDVAIEIFSLSKGYNMSGFRVGFAVGNKKMIQALKKYQTHTNAGMFGALQDAATYALNHYDEFLEKQNEIFRRRRDNFESQLKHAHLPFVHSKGGIYIWLHTPPGYDSEAFEQLLLKEKSILVAPGKPFGENGNQYVRVSLALDDKQLEEAANRLTQLRYLYER

SEQ ID NO: 18781 - protein, 395 aa, Thermobifida fusca
MRTIEDLDVAGKRVFVRADLNVPLDGDRITDDGRIRASLPTITALRERNARVIIGAHLGRPKGKVDPAYSLKPVAARLGELLGTEVRFASDTAGESAQAISRELADGEVALVENLRFEPGETSKDDAERGEFADRLAALAELYVGDGFGAVHRKHASVYDLPKRLPHAAGGLVLAEVNVLRKLTESPQRPYVVVLGGSKVSDKLGVIDNLLNTADRILIGGGMAYTFLAAQGYEVGASLLERDQIDTVKGYLRRAEERGVELVLPVDVVAAEKFAADAAHDVVDVREIPADRMGLDIGPASAELFASKLADAATVFWNGPMGVFEMEPYAKGTRSVAQALADSSAFTVVGGGDSAAAVRALGFDEKAFSHISTGGGASLEYLEGKTLPGIAALEE

SEQ ID NO: 18782 - protein, 60 aa, Oryza sativa
  unsure (1)..(60): unsure at all Xaa locations
FGTRFRPSSSFDTKTTXTNAGAPVWNDNQALTVGPXGPILLQXYHLIEKVAHFXRERXPE

SEQ ID NO: 18783 - protein, 112 aa, Pseudomonas putida KT2440
MSQELQIIDLVEGDGKAAVKGALITTQYTGWLADGSEFDSSWSRGKPFQCVIGTGRVIKGWDLGLMGMRVGGKRKLQVPAHLGYGERSVGAIPPNSDLTFEIELLEVLTRDD

SEQ ID NO: 18784 - protein, 555 aa, Psychrobacter sp. 273-4
MNDTKDNKVYSSARHSKYWQQLQTLAESPWSLAALFAQDNTRTQHFSMQAGALYMDYSKQCIDDAVLENLLNLANSCELAARIQSLLQGAMVNTSEERAALHTALRLPATASLQLDTQDVVADVHQSLLQVERLSERVRSGTWRGFSGQAITDVVNIGVGGSDLGPLMATTALDEWADTCVEVHFVSNMDGTQLDNLLKHLNPETTLFIISSKSFGTVDTLSNAKTALSWLLATAKLRAGTEDSVRRRHFIGISANGQKMSAWGIHPEHQLQLWEWVGGRFSLWSAIGLAIAIRIGMSGFKELLAGAHSMDDHFAQADFAKNVPVLLGLIAVWNSTFLQVNAHTVLPYDGRLSYLPSYLTQLEMESNGKSVTQHGDRIDYDTCPILWGEIGSNAQHAFYQLLHQGTQQVSCDFIACVRRYSDEAKNTPLQQQHELSLANCLAQSRVLAFGNAAIAESDGQVACDADKYKYYRGNQPSTTLLLDELTPHSLGALIALYEHKVYVMASIWDINPFDQWGVEMGKQMAESVHDAMQQERGAQFDTSTNQLLKHIKELS

SEQ ID NO: 18785 - protein, 573 aa, Candida albicans SC5314
MCGIFAAYRQPEVEDFKSKALQYSKLIRHRGPDWSGNVVQNSTILCHERLAIVGLDSGAQPIVSPDGNFTLAVNGEIYNHIQLREQFPDYKFKSLSDCEPIIPLFTKYDIDAPKHLDGMFAWVLYDKKNDRIVAARDPIGITTLYMGKSSKSPKTRYFASELKCLIEECDEIFAFPPGHVYDSNTDEITRYFQPSWWDASKVPEQHVDFKKVRETLELAVRKRLMAEVPYGVLLSGGLDSSLIASIASRETKKAAQASFNPEGIDANKELSGVDDKGSLHSTGVFNQLHSFAIGLPGAPDLLAAEKVAHFIGTIHHSHTFTLEEGLDALDDVIYHLETYDVTTIRASTPMYLLSRKIKAQGVKMVLSGEGSDEIFGGYLYFANAPSAKEFHEECVKRVKNLHYADCLRANKSTMAWGLEARVPFLDKQFLEVCMNINPEDKLIQPGKIEKYILRKAFDTSDEPDVKPYLPEEILWRQKEQFSDGVGYSWIDGLKDTAEKMVSDEEFAHPKPEWGDDIPTTKEAYWYRCKFDKMFNGSKAAASTVMRWIPKAEWGCHADPSGRYAATHDHKVAQ

SEQ ID NO: 18786 - protein, 466 aa, Acinetobacter sp. ADP1
MKKMLLALSLSGALLGGSAAWAENAASAPATEETTTVVATTTEAPVTGSAEAPSAATATPAPAATPKMDSGDTAWILISTALVLLMTIPGLALFYGGMVRKKNVLSTMAHSFVAAAIVSIVWVVIGYTLAFSTTGNAFVGGLDKIMLSGITTEALSGTIPEILFVIFQMTFAIITVAIISGSVAERMKFGAFVAFITIWVIVVYAPITHWVWGGGWLGSDGALDFAGGTVVHINSGVAGLVAAYMLGKRIGLGKESMAPHNLALTVIGASLLWVGWFGFNGGSALAANGAAGYALVTTQVAAAAAAISWGIVEKIVRGKTSLLGLLSGAVAGLVVITPAAGFVTVSGALIMGLIGGVVCFWGISGLKRMLKADDSLDAFGLHAVGGMAGAILTAVFASPFIMGDKAPASVTHQLWIQIEGVLATIAYSAVLTFIILKVIDVVIGIRANSDDERMGLDLSQHGERVE

SEQ ID NO: 18787 - protein, 509 aa, Zea mays
MMIARRLLRPNAPAQATSLLKHVTGTASLQGNADSLLDGTVRHFGSAPSAQPEENGFKGHGMLAPFTAGWQSNDLHPLIIERSEGSYVYDINGNKYLDSLAGLWCTALGGSEPRLLKAATEQLNKLPFYHSFWNRTTKPSLDLAQEILSMFTAREMGKVFFTNSGSEANDSQVKLVWYYNNALGRPNKKKFIARSKAYHGSTLVSASLTGLPALHQKFDLPAPFVLHTDCPHYWRYHLPGETEEDFATRLATNLENLILKEGPETIAAFIAEPVMGAGGVIPPPKTYFDKVQAIVKKYDILFIADEVITAFGRLGTMFGCDYYNIKPDLVSLAKALSNAYVPIGATLVSPEISDVIHSQSNKLGSFAHGFTYSGHPVACAVAIEALKLYRERDIPGHVKQIAPKFQDGIRALADSPIIGEIRGLGMIMGTEFTNNKSPTDLFPAEWGVGAIFGEECQKRGMLVRVAGDAIMMSPTLIMTPGEVDELVRIYGEALKATEERVAALQSKKN

SEQ ID NO: 18788 - protein, 108 aa, Eremothecium gossypii
MSMSLMRPTTAPSEGEAPKKKFQIKKWIAVAFWSWDIAVENCAICRNHIMEPCIQCQPNAMTDTENECVAAWGTCNHAFHLHCINKWLLTRNACPLDNKTWQFAKYGK

SEQ ID NO: 18789 - protein, 296 aa, Pinus pinea
SAKGFFEVTHDISHLTCADFLRAAGVQTPLIVRFSTVIHERGSPETLRDPRGFAVKFYTREGNFDLVGNNFPVFFVRDGMKFPDMVHALKPNPKSHIQEDWRILDFFSHHPESLHMFTFLFDDLGIPLNYRHMDGSGVHTFTLVNKAGRQTYVKFHWRPTCGVKCLLDDEAVVVGGTNHSHATKDLYDSIAAGNYPEWKLFIQTMDPRDEDKYDFDPLDVTKTWPEDIFPLQPVGRMVLNKNIDNFFAENEQLAFCPALVVPGVYYTEDKLLQTRVFSFADTQRHRLGPNYLMLPA

SEQ ID NO: 18790 - protein, 787 aa, Arabidopsis thaliana
MAECSVCRSRLVSPSSKAISRAYDNYNYKIRVSSKQRALNVFLVVGDCMLVGLQPVLVYMSKVDGKFNFSPISVNFLTEIAKVIFAMVMLLFQAARNNMLLAVPAGLYAINNYLKFTMQFHTAIHFSAVPAIFQSCYCEDAQQSKSSGDCCTTEDDNEASVFHHTGISINQLRSLPEGATTVAVPIATGAYICTFIFSLIQHVIMQVTVPSLASVYNEYALKSQYDTSIYLQLAVLTLWFDTFLLARIVELALFFGLVISLSNVVDHDPLLGSECKALISLVQNLFLYGYGAIFNFLGILGTVIYKGPGSFDILQGHSRATMFLILNNAAQGILSSFFFKYADTILKKYSSTVATIFTGIASAALFGHILTMNFLLGISIVFISMHQFFSPLSKAKDEQQNGNIELVDAKDGHRAKDSFINMAAGATEESTSEKHYTMNMTSCSSSSSSSFPRLFAAKSQIYKAPVLSFSTPKRRRPRPRRNRKSNGSSYDHTDGNLLSISTSSPSGADDQSLSLTLDVHRISTLANYRFQLFLDSSKDAFSDLQTLISLDDNRRVVVSCKKSTMQFVGGVVILGFVFGFAIRVLVKLGSALKGNFQSNPKFVVRRDRSLGGKEVVVSVDNIRSSSRDSKSFIASDQASRSNSTPRNLHLKAQNNLPKWWPTSLTSQSFDVVDKEDYQREANRIVRAPWESSSVEICSEDAREFIAGLAENIGLAKIDAARMVSAAVAARTRSWFLQAWAEMEMVARGLEKLMKLEERQSLLKTFVGMCCSEDSQRSAAEALGLVHW

SEQ ID NO: 18791 - protein, 254 aa, Streptomyces coelicolor A3(2)
MHDLTGKNVIITGGARGLGAEAARQAVAAGAHVLITDVLDDDGENAARELGDRARFLHHDVTSEEDWSRAADFAVTEFGALHGLVNNAGISTGTPLESESVDHFRKVLDVNLTGVFIGMKTVVPALKEAGGGSIVNISSAAGLMGLALTAGYGASKWGVRGLTKIGAVEWGTARVRVNSVHPGMTYTPMTAAVGIERGEGKYPNTPMGRVGEADEIAGAVVFLLSDAASYVTGAELAVDGGWTTGPTVAYVMGQ

SEQ ID NO: 18792 - protein, 185 aa, Pseudomonas aeruginosa UCBPP-PA14
MSVDLAHIRQVMAEADCLFNNDEVEAAIGRVAEAINRDLGETNPVVFCVMNGGLIFSGKLLPLLDFPLELSYLHATRYRNETSGGELFWKAKPEISFIDRDVLIIDDILDEGHTLSAIIDFCKHAGARAVHTAVLVDKEHERKARPDLKASFTGLYCADRYVFGYGMDYKGYWRNAAGIFAVKGL

SEQ ID NO: 18793 - protein, 358 aa, Acinetobacter sp. ADP1
MFIKNAWYVACRPEEIQDKPLGRTICGEKIVFYRGKENKVAAVEDFCPHRGAPLSLGYVEDGHLVCGYHGLVMGCEGKTIAMPAQRVGGFPCNKAYAVVEKYGFIWVWPGEKSLANEADLPTLEWADHPEWSYGGGLFHIQCDYRLMIDNLMDLTHETYVHSSSIGQKEIDEALPVTKVDGDHVVTERYMENIIAPPFWQMALRGNHLADDVPVDRWQRCHFFAPSNVHIEVGVAHAGHGGYNAPKDKKVASVVVDFITPETETSHWYFWGMARNFQPENQQLTDQIREGQGKIFTEDLEMLEQQQQNILRNPQRQLLMLNIDAGGVQSRKIIDRLLAKENSPSPQDTQRKFPNIRVI

SEQ ID NO: 18794 - protein, 379 aa, Pennisetum glaucum
MATAGKVIKCKAAVAWEAGKPLSIEEVEVAPPQAMEVRVKILYTSLCHTDVYFWEAKGQTPVFPRIFGHEAGGIIESVGEGVTDVAPGDHVLPVFTGECKECPHSKSAESNMCDLLRINTDRGVMIGDGKSRFSINGKPIYHFVGTSTFSEYTVMHVGCVAKINPEAPLDKVCVLSCGISSGLGASINVAKPPKGSTVAIFGLGAVGLAAAEGARIAGASRIIGVDLNPSRFEEAKKFGCTEFVNPKDHNKPVQEVLADMTNGGVDRSVECTGNINAMIQAFECVHDGWGVAVLVGVPHKDAEFKTHPMNFLNERTLKGTFFGNFKPRTDLPNVVELYMKKELEVEKFITHSVPFSEINKAFDLMAKGEGIRCIIRMEH

SEQ ID NO: 18795 - protein, 350 aa, Oryza sativa
MPSANVRGAQPSADRRLSTLVRHLLPSSARTATTTSTSSSAADADSSLQAFPTMASSSVFAGLAQAPEDPILGVTVAYNKDPSPVKVNLGVGAYRTEEGKPLVLNVVRRAEQMLINNPSRVKEYLPITGLADFNKLSAKLIFGADRSYRYYDPATRGLDFQGLLEDLGSAPSGAIVLLHACAHNPTGVDPTLDQWEQIRQLMRSKALLPFFDSAYQGFASGSLDQDAQSVRMFVADGGELLMAQSYAKNMGLYGERVGALSIVCGSADVAVRVESQLKLVIRPMYSNPPIHGASIVATILKDSAMFNEWTVELKGMADRIISMRQQLFDALKTRGNSFCQLLYIVLAGST

SEQ ID NO: 18796 - protein, 207 aa, Oryza sativa
MCGGAIIYDYIPARRRLCASDFWPDADDSDPHTPAPEKPPRAKRERKNQYRGIRQRPWGKWAAEIRDPVKGVRVWLGTYPTAEAAARAYDRAARRIRGAKAKVNFPNDFGAAPAPAAAAAKAVPRVAPTPAVLPPPKMEAVSEGAGACSSDEVKELSEELLAYENYMSFLGIPYMEGGAASAAGAEEAAAPAGLWTFEDYELPSLAL

SEQ ID NO: 18797 - protein, 488 aa, Ralstonia eutropha JMP134
MIQTQLYIDGRWQSPLEGSTRDILSPADESVIAQAAEGTRADARIAIAAARRAFDGPWRQTTIRDRARLLNRIAALIDRDAEELARFESLNTGKTLTESRTDMGDIAATFRYFAGLVASESGAVNEAPHHVISRTLREPVGVCGLITPWNYPLLQAAWKIAPALGAGNTVIIKPSNLTPLTTHHFTKLIAELDLPAGVFNLVTGGAEVGAELAESRDVDLVSFTGGAFAGESIMKAATGNFKRIGLELGGKNPNIVFADADLDVAVDYALNAAFFHAGQVCSAGSRLMIEDSIYDAFVAKLAERLPRIAIGNGFHAETQMGPVQSAQQHEKILRMVQAGVAEGARLVYGGKRPEGDVYRKGYWLQPTLLADVTADMNIAKDEIFGPVVTAERFRSEDDALRAANDTPYGLAAAVWTRDLDKANRMSRALRFGTVWVNDYHPYFPEAPWGGYKASGIGRELARIGLDEYTELKHSYINLAPKAMGWFGA

SEQ ID NO: 18798 - protein, 379 aa, Pennisetum glaucum
MATAGKVIKCKAAVAWEAGKPLSIEEVEVAPPQAMEVRVNILYTSLCHTDVYFWEAKGQTPVFPRIFGHEAGGIIESVGEGVTDVAPGDHVLPVFTGECKECPHCKSAESNMCDLLRINTDRGVMIGDGKSRFSINGKPIYHFVGTSTFSEYTVMHVGCVAKINPEAPLDKVCVLSCGISTGLGASINVAKPPKGSTVAIFGLGAVGLAAAEGARIAGASRIIGVDLNPSRFEEAKKFGCTEFVNPKDHNKPVQEVLADMTNGGVDRSVECTGNINAMIQAFECVHDGWGVAVLVGVPHKDAEFKTHPMNFLNERTLKGTFFGNFKPRTDLPNVVELYMKKELEVEKFITHSVPFSEINKAFDLMAKGEGIRCIIRMEH

SEQ ID NO: 18799 - protein, 90 aa, Lycopersicon esculentum
NRAGKSTYVKFHRKPTCGVMSLLEEEADRVGGANHSHATQDLYDSTAAGNYPEWKIFIQTMDPDHEDRFDFDPLDVTKTWPDDILPLQPD

SEQ ID NO: 18800 - protein, 322 aa, Psychrobacter sp. 273-4
MKSTIELLEDTDFPAIKRRELKILQVNMGYLCNMSCVHCHVAASPYRTEMMSRELVELIPQILQAQNIDTLDLTGGAPEMHEDFKYLVKAARALGVKVIDRCNLTILMVEGYEDMAQFLADNEVEVVASLPCYSLENVDKQRGKGAFDDSILGLHKLNALGYGKSGSNLTLNLVYNPQGATLPPNQQQLEADYKRELKVHFDIEFNQLFALINMPIQRFGAVLLAKKQFHPYMDLLKVNYVATNLTEVMCRSTISVNWLGELFDCDFNQQLEIPVPNKSRRHLRDLLTQNPAGDDIAIADHCYGCTAGQGSSCGGTLEESAI

SEQ ID NO: 18801 - protein, 74 aa, Lycopersicon esculentum
CRAAVPSGASTGIYEALELRDGGSDYLGKGVSKAVNNVNSIIGPALVGKDPTDRAGLDNFMVHQLDGTQNEWGW

SEQ ID NO: 18802 - protein, 294 aa, Psychrobacter sp. 273-4
MKKITHAVIPVAGFGTRMLPLSKSVPKELLPLGNRPAIHYVVEEAIAAGIKHIVLVGHAQKSAIENYFDINAELDNQLRDKGKDELADSLNWLPDDVTISMIRQGQPLGLGHAVLAARPIIGQHDFAVLLPDVVLDPFNGDMSADNLAFMMDAFAKDNHSQILVDKVADEDVHKYGIAQLNEALSGVSSVDNEIDANISFKVAGFVEKPNVVDAPSRLAVVGRYVFSHHIFDYLANTKASVGGEIQLTDAIDALISEYGVNVTTMRGNSYDAGDMRSYMQAFMYFAQQQLADEE

SEQ ID NO: 18803 - protein, 483 aa, Psychrobacter sp. 273-4
MKDSYDLVVIGGGPGGYEAAIRAGQLGMSVACIEKRVYKGEPALGGTCLNVGCIPSKALLDSSHRYEATKHDLAEHGISTGDVAIDIEQMIARKEGIVKQLTGGIAALLKGNGVDWLQGWGTLVDGKGNDKKVKFTALADDSETTITAKNVILAAGSVPIDIPVAKTDGDRIVDSTGALDFTAVPKRLGVIGAGVIGLELGSVWRRLGAEVVVYEALPSFLAAADKDIAKEAGKMLKKQGLDIRVDTKVTNAEVKGDQVIVTSEAKGESSEESFDKLIVCVGRRAYSEKLLGEDSGIQLTERGLIDVNDQCKTNLDGVYAIGDLVRGPMLAHKAMEEGMMAVERIHGDKAQVNYDTIINVIYTHPEIAWVGLTEQEAEAAGYEVKTGSFNLAANGRALAQSEAQGSIKVVADAKTDRLLGMHAISAGAGDIVHQGMIAMEFVSSIEDLQLMTFAHPTISEAVHEAALSADGRAIHAIQRKKRK

SEQ ID NO: 18804 - protein, 511 aa, Erwinia carotovora subsp. atroseptica SCRI1043
MAHDNLEGRSAFGEVGSLDLKKRYDNFIGGTWVPPDAGQYFVNLTPVTGQPMCEVASSSTRDIDHALDAAHKAKAEWGGLSVQERALVLNRIADRMEQNLERLAQVETWDNGKPIRETSGADVPLAIDHFRYFAACIRAQEGAISEIDGDTVAYHFHEPLGVVAQIIPWNFPLLMACWKMAPALAAGNCIVLKPAKLTPMSVLILMELIQDLLPAGVINVVNGSGSEIGEYLATSKRVAKVAFTGSTEVGQQIMSYAAQNVTPVTLELGGKSPNIFFADVMDKEDSFFDKALEGFTLFAFNQGEVCTCPSRALVQESIYDRFMERAIKRVEAIRIGNPLDSKTMMGAQVSAGQLETILNYIDIGKKEGARVLTGGQRKAMPGGLAEGYYLEPTILFGKNSMRVFQEEIFGPVLAVTTFKTMEDALEIANDTEYGLGAGVWSRNGNVAYRMGRGIQAGRVWTNCYHAYPAHAAFGGYKQSGIGRENHKMMLDHYQQTKCLLVSYSDKPMGLF

SEQ ID NO: 18805 - protein, 410 aa, Psychrobacter sp. 273-4
MAEIKAPVFPESVADGTIVEWHVTEGQQVNRDDLLAEIETDKVVLEVVAPDNGVVTRIVKQVDDTVLSDELIAEFEAGASASAEAAPAVDPDQPAAPVQPKQATDGGEPAQASAEADHKDQSPAVRKAAKVSGVDPKNVEGSGRGGRVTKTDMSNPTLKADSSITSDSGRPVAEAVGERTEKRVPMTRLRKTIANRLLAASQETAMLTTFNEVNMKPLMDMRTKYKDQFEKRHGTRLGFMSLFVKAATEALKRYPAVNASLDGDDIVYHGYYDIGVAVSSNRGLVVPVLRDTDRMSMADVEAKIREFGGKAQEGKLGLEDMVGGTFTISNGGVFGSLMSTPILNPPQTAILGMHAINDRPMAVNGEVKILPMMYLALSYDHRMIDGKEAVQFLVTLKELVEDPTMLLLDL

SEQ ID NO: 18806 - protein, 293 aa, Saccharomyces cerevisiae
MESTSGERSENIHEDQGIPKVILPADFNKCSRTDLVVLISRMLVSLIAINENSATKKSDDQITLTRYHSKIPPNISIFNYFIRLTKFSSLEHCVLMTSLYYIDLLQTVYPDFTLNSLTAHRFLLTATTVATKGLCDSFSTNAHYAKVGGVRCHELNILENDFLKRVNYRIIPRDHNITLCSIEQKQKKFVIDKNALGSLDLDSYSYVNRPKSGYNVLDKYYRRIVQLVGSFNASPDKSRKVDYVLPPNIDIVSESGSQTTQLKGSSSPNSHSSQKRYSEAKDAHIYNKRSKAD

SEQ ID NO: 18807 - protein, 147 aa, Guillardia theta
MATKRIQKEHKDLLKDPPSNCSAGPSDENLFRWTASIIGPSDSPYAGGVFFLSILFPPDYPFKPPKVQFTTKIYHPNINSNGSICLDILRDQWSPALTVSKVLLSISSLLTDPNPDDPLVPEIARVFKENRSRYEATAREWTQRYAT

SEQ ID NO: 18808 - protein, 311 aa, Triticum aestivum
MASFGSIAVALVVCAMLLQTCVATRRLQALVQEQPITMKYHKGALLSGRIAINLVWYGNFSAPQRAIVTDFVSSLASASASPAPQPEPSVATWFKTAQKYYASSKARFPALALGSHVFDRSYSLGRRLRERDLVRLAARGGPSRAINVVLTADDVAVDGFCMSRCGSHGASPRSRAGRFAYVWVGNPATQCAGQCAWPFHQPQYGPQMAPLAPPNGDVGVDGMVVSLASMVVGTVTNPFGNGFFQGPAEAPLEAATACAGVYGKGAYPGYAGSLLVDPATGASFNANGAHGRKYLVPALVDPDTSACSTLG

SEQ ID NO: 18809 - protein, 542 aa, Sinorhizobium meliloti 1021
MIRTVSTNPYGDQKPGTSGLRKKVPVFQQKNYAENFIQSIFDSLEGFEGQTLVIGGDGRYYNREVIQKAVKMAAANGFGRVLVGRGGILSTPAASNVIRKYKAFGGIVLSASHNPGGPTEDFGIKYNVGNGGPAPEKVTDAIYSRSKAIDSYKIADAPDVNLDVEGSQQVEDMTVTVIDPVADYAELMESLFDFDAIRKLIAGGFRVVFDAMSAVTGPYAKEIIEKRLGAPKGSVMNFIPLPDFGGHHPDPNLVHARALYETMMAPDAPDFGAASDGDGDRNLIIGKGIFVTPSDSLAMLAANAHLAPGYAKGLAGIARSMPTSGAADRVAEKLGVGIYETPTGWKFFGNLLDEGLATICGEESAGTGSNHVREKDGLWAVLLWLNILAARKESALEIARKHWATYGRNYYSRHDYEEVDTDAANGLIAALRDKLAALPGKSFGALTVETADDFSYHDPVDKSVSKNQGVRILFKGGSRVVFRLSGTGTSGATLRVYIERYEPDPTRHDLDTQEALADLIAVADEIAEIKANTGRDEPSVIT

SEQ ID NO: 18810 - protein, 197 aa, Glycine max
FTLAGLTARSYRYYDPATRGLDFQGLLEDLSSAPSGAIVLLHACAHNPTGVDPTLEQWEQIRQLMRSKALLPFFDSAYQGFASGSLDKDAQSVRMFVADGGELLMAQSYAKNMGLYGERVGALSIVCGSADIAVKVESQLKLVIRPMYSNPPLHGASIVATILKDSAMFDEWTLELKAMADRIISMREQLFNALKIR

SEQ ID NO: 18811 - protein, 202 aa, Glycine max
CSRWLQRNASHKPFLLAMHSHIERILWSEDQISRRVSELAAEISADFGGQSPAPVVVGVATGAFLFLADLVRKIDLSIAVDFVRVESYGFGTVSNGAPTISFDLKVDVNARHVIVVEDIVDTGHTLSKVIGHLKSKGVSSVSVCTFLDKPARRKVHFQLLGEGKYYRGFECPDYFVVGYGLDFAELYRNLPYIGVLKPELYK

SEQ ID NO: 18812 - protein, 348 aa, Triticum aestivum
  unsure (1)..(348): unsure at all Xaa locations
LRLARPPPGGPASASAPPARPAPRHAATSAPGAAARGRACGGSPPGAGCSRPGRWAGARPRAAWGRGDDIIPVCKAVLEAFRDLGTRGNRQKTRMMWLIDELGMEAFRSEIEKRMPNGVLERAAAEDLIDKKWERRDYLGVHPQKQEGLSFVGLHVPVGRLQAADMFELARLADEYGSGELRLTVEQNIVLPNVKNEKVEALLCTGRVHPTAARRCRWPTSASWAASPRTAAARSSRRRTSSSVAAPDVEARVSVPRAVRMHWTGCPNSCAQVHVADIGFMGCLTKNSSGKIVEAADIFVGGRVGQXTSHLTGVYKKAVPCEDLVPLVADLLVERFGAVPREREEDEE

SEQ ID NO: 18813 - protein, 427 aa, Mycobacterium avium subsp. paratuberculosis str. k10
MVRIASVVARQLLDCKARPLVEVEITTDTGHVGRGAAPTGTSVGAHEAFVLRDGDPTRYRGRSVHRAVAAVRDEIAPALTGAELDDPRSLDRVMIELDDTPDKHRLGGNAIYSTSIALLRAAAAAAGTPTYTYVGALLGLTPPTTVPMPSFNMINGGRYGDVEQSFSEFLVVPYRAESIQAAVEKGVSLFEVLGEVLAEHLGRTPLLASSYGYIAPSGDPHAVLELLAEAVERAGCADVMAFALDCASSEVCDNGSATYAFNGGRVTAEALIDYARALSQEFPMLFIEDLLDGDDWAGFTKAVQTVNRSIIVGDDLIVTNRDRLRRAVETSAVDGFILMPNQVGTIAEALDCFEYASQNGLLAIPSGRSGGVIDDVVMDLAVGLGAPLQKNGAPRSGERIEKLNFLLRAAEGIPDCALADVPALARF

SEQ ID NO: 18814 - protein, 416 aa, Glycine max
MLALLQNCSMPLARAVRSPPRTHVRPCFTAVAYASISSRANSQSQVLLGLSEKELQQLALDLNQETYRGKQLHHFLYQRKLREIQDFTQLPQGFRNTLEETGWKVGRSPIFETVTAADGTVKLLLKLEDNRLIETVGIPVMVDKGLTRLTACVSSQVGCPLRCSFCATGKGGFSRNLQRHEIVEQVLAIEEVFKNRVTNVVFMGMGEPMLNLKAVLEAHHCLNKDVQIGQRMITISTVGVPNTIKKLASHKLQSTLAVSLHAPNQKLRETIVPSAKSYPLDALMSDCREYFQQTSRRVSFEYALLAGVNDSVNHALELAELLHRSGSGYHVNLIPFNPIEGSEYQRPSKRAVLAFSGALESSKITVSVRQTRGLDANAACGQLRNKFQKTPVVTDPFDLAVTDTSMPYNNKFAVSS

SEQ ID NO: 18815 - protein, 277 aa, Candida albicans SC5314
MSLQKLTAEIYSLFGKGDYQGCQQLLAPIKLELVKHDLLVPLPSNTTDKNQINDLRIAQRILEIGALSSLLTNNYSGFENYFAQLRPFYSNPKLHNLQKVHINTDITKIISLYLLYLLSQGLISKFHVELEVIYNSSQYDAQQDKYLQFPINLESNLMEGNYIKIWKLLKEEKNLPCQEYTHFVDTLINALRFEIAKSLEKTYDSIPISNCKNLLYLPQELSDANFEKTLKETYQVDNWKFEDGVIYFTKNENETNVDNQSVIKNLLGYAEQIESIV

SEQ ID NO: 18816 - protein, 320 aa, Enterobacter cloacae
MIKKIGVLTSGGDAPGMNAAIRGVVRAALTEGLEVFGVYDGYLGLYEDRMVQLDRYSVSDMINRGGTFLGSARFPEFRDEHVREVAIENMKKRGLDALVVIGGDGSYMGAKRLTEMGFPCIGLPGTIDNDIKGTDYTIGFFTALGTVVEAIDRLRDTSSSHQRISIVEVMGRYCGDLTLAAAIAGGCEFIVVPEVEFSREDLVAEIKAGIAKGKKHAIVAITEHICDVDELAKYIEAETKRETRATVLGHIQRGGSPGPYDRILASRMGAYAIDLLLQGHGGRCVGIQNEKLVHHDIIDAIENMKRPFKGDWLDCAKKLY

SEQ ID NO: 18817 - protein, 229 aa, Synechococcus sp. WH 7803
MVTTPDAFGIGGFSIHWSAAMPPTTASVQSQCPYCGVGCGLDLLPPGEAGKAVKRDAEGNPMWSARGHREHPSSHGQVCIKGATVGETLGQGRLSQPLYRATLTDPFEAISWNSAFDLLTERIQSTLASKGADAIAMYGSGQFHTEDYYIAQKLLKGALGTNNFDANSRLCMSSAVAGYTRSLGSDGPPCCYEDLDHCSVVILIGTNTAECHPVLFQRLLKRKKRDPSL

SEQ ID NO: 18818 - protein, 515 aa, Acinetobacter sp. ADP1
MTDATVAKIPHVLVIMDGIGHREAIKDNAFLAAKTPSLSMMKQKHPHSLISGSGEDVGLPDGQMGNSEVGHMNLGAGRVLYQDFTRITKDIRDGVFFEHEVLVDAVEKAKAVHGAVHIMGLLSEGGVHSHEDHIVAMCELALKRGATVYLHAFLDGRDTPPKSAQPSLEKLDALFAQYPEQGRIVSMIGRYFAMDRDNRWDRVEQAYRLLTESEAVRTAQSAVQGLELAYAAGESDEFVKATRIGDAVAVQDGDSIVFMNFRADRARELTRAFVEHDFSGFTRQRIPHLSKFVMLTRYQATIDAPVAYMPEALHNSIGEYLSNLGKTQLRIAETEKYAHVTFFFSGGREDEYPGEKRILIPSPNVATYDLKPEMSAYEVTDQLVNAIDSGEFDLLVVNYANGDMVGHTGIFDAAVKAVEAVDTCLGRVYQAVMAKHGHMIITADHGNVEQMQDYQSGQVHTQHTTELVPFIYVGPTQAVIAEGGVLADVAPTLLNLMQLPVPAEMQGRNLITLSS

SEQ ID NO: 18819 - protein, 492 aa, Zea mays
  unsure (1)..(492): unsure at all Xaa locations
MDPYKHRPSSGSNSSFWTTNSGAPVWNNNSALTVGQRGPILLEDYHLIEKLAQFDRERIPERVVHARGASAKGFFEVTHDVSHLTCADFLRAPGVQTPVIVRFSTVVHERGSPETLRDPRGFAVKFYTREGNFDLVGNNMPVFFIRDGMKFPDMVHAFKPNPKTNLQENWRIVDFFSHHPESLHMFTFLFDDVGIPLNYRHMEGFGVNTYTLINRDGKPHLVKFHWKPTCGVKCLLDNEAVTVGGTCHSHATKDLYDSIAAGNYPEWKLYIQTIDLDHEDKFDFDPLDVTKTWPEDIIPLQPVGRMVLNKNVDNFFAENEQIAFCPAIIVPGIHYSDDKLLQTRIFSYADTQRHRLGPNYLMLPVNAPKCAXHNNHHDGFMNFMHRDEEVNYFPSRFDPARHAEKVPIPPRVLTGCREKCIIQKENNFKQAGERYRSFDPARQDRFIQRWVDALTDPRVTHEHRTIWISYWSQCDAALGQKLASRLNLKPSM

SEQ ID NO: 18820 - protein, 360 aa, Oryza sativa
  unsure (1)..(360): unsure at all Xaa locations
MPRPAKIRKKHENVFDQLIKAIKAPVDFDLPPVLKEWKSNYYVPIKRNAYITRKRVEDDGIFCSCTPSGSSATCDKDCQCGMLFSCCSSTCKCENKCANKPFQHRTLRKTKLIKTEKCGNGVVAEEDIKKGEFVIEYVGEVIDDRTCEQRLWKMKRQGDTNFYLCEVSXNMVIDATNKGNMSRFINHSCEPNTEMQKWTVEGETRVGIFALRDIKTGEELTYDYKFVQFGADQDCHCGSSNCRKMLGITKPVNSIVLHNGNLSQDQHVRKKRKTYLENCIGEIVRLWHRRHSMYLAASIYDFNERNGIHTLLFTDATIEEFDLREEDWDFLPDPDGPEEVFVSIEVHLVMLVKIVGWVIN

SEQ ID NO: 18821 - protein, 353 aa, Acinetobacter sp. ADP1
MTTMNAIYQHASSTEQYLDLGLRDQWYPVLASWEVSANPVGITRLGENIVVWRDEAGQLYALEDRCPHRGARLSLGWNLGDRVACWYHGVEVGGDGVVADVPAVHECPLKGAACVKSYPIIEKHDAIFIWFGIDANEPPAELVFPEQLASEAWSSFLCQADWKVNHQYAIDNVMDPMHGTYLHCTSHSMAEGERTAEMKHRSTEHGFIFEKEGQTGVNFDWVEYGNTGASWLRLSIPYRKDFGPGGVFWIVGFATPIDADNTRVFFWRCRKVNGWQRNVWRFLYRNHLEKLHWDVLEQDRIILENLAPNARSKEFLYQHDVGLSRLRRLMKKEAEKQLKKIAVLNTSSLTETP

SEQ ID NO: 18822 - protein, 195 aa, Morus alba
GFFEVTHDISNLTCADFLRAPGVQTPVIVRFSTVIHERGSPETLRDPRGFAVKFYTREGNFDLVGNNFPVFFIRDGIKFPDMVHALKPNPKSHIQEFWRILDFFSHHPESLHMFTFLFDDIGVPQDYRHMDGSGVNTYTLIDKAGKAHYVKFHWKPTCGVKSLLEDEAIRVGGANHSHATQDLYDSIAAGNYPEW

SEQ ID NO: 18823 - protein, 301 aa, Phytophthora infestans
MFSSSKIAAVCLAVVALTNSAYAEKEAAQTFGLLGAGLHGGAGLYGAGAAGLHGGAGVGAGLYGRGAGYGGAGAGLYGRGAGGVGAGLYGRGAGYGGAGAGLFGRAAGYGGAGAGVGAGVGGAGVGNGYGGVGVGGTTGVGAGVGGTTGVGAGAGVGGGVSGNVGVGVGVGGNAAVGAGVGGAANGGVSANAGVGAGVSGNTGAGVGGGASGGANGGVSANAGVGGGVGGSAGVGGSVGVGGAASTGAGGATTTTDGRTSTSTSQNGGPRQLQLPRLQARQRTAGTGASTKQTGYRMLRSQ

SEQ ID NO: 18824 - protein, 444 aa, Lactobacillus plantarum WCFS1
MTNKYDYDVLYIGAGHATFDGAAPLAKTGVRVGVIESGLIGGTCPNRGCNAKITLDEPVKLTRETARLNDILSSAPTINWTANVAHKQEIIDPLPAGLTARLEDGGATIIHGHATFKDAHTVVVDDQQTITAEKIVIATGLKPHRLDIPGTKLAHDSSDFMNLKRLPQSIVIIGAGYIGMEFATIANAAGAQVTVMLHGDQALRDFYQPFVAQVVDDLTERGVTFIKNANVQAFTKQDDQFQVSYGDHQQLTTDWILDATGRIPNLDGLGLDRIGVKYDRHGVYVNDHLQTNVPNIYAAGDVLANDLPKVTPAAYFESKYLMRLFSGQTSAPIDYPVIPSVVFTSPRIAQAGMKIPAAEKAGLTVSDNDLADYWYYQVSKEPIAASKQVHDQDGHLVGVTEISDQAEDAVNALLPAIEYQLDREQIDRLIGIFPTIGYAAWHRA

SEQ ID NO: 18825 - protein, 536 aa, Bradyrhizobium japonicum USDA 110
MLIKRANQRSLRHGSVAESLAGQGGGLDRRSFLRKSGLAGGALAVLGTLPVGGVRKAEAAMAGPLTAGASVRKSVCTHCSVGCTVTAEVLNGVWIGQEPSWDSPINRGSHCAKGASVRELVHSERRLRYPMKLVGGQWTRVSWDTAINEIGDKLQTVREKSGPDSVYWLGSAKMTNEGAYLFRKLGAFWGTNNTDHQARICHSTTVTGVANTWGYGAMTNSFNDIRNAKTQVVLGGNPAEAHPVSLQHLLEGKELQKANFVVIDPRLTRTAAHATEYVRMRPGTDIPVLYGMMWHILQNGWEDKEFIRQRVYGFDDLRKEVEKWNPEEVERVTGIPGEQLKRVAKMFATEKPATLIWAMGQTQKTVGTANVRASCILLLMTGNVGGAGMGANIFRGHDNVQGATDVGLDIVTLPFYYGLAEGAWKHWSRVWEVDYDFLKSRFDSKQIMETPGIPLTRWFEAVTLPKDQVAQKDNVKAVFVQGHASNSITRIPESLNGLKALEAARHRRSASDDLGLARSRGGTQGWCLHSPGRHPI

SEQ ID NO: 18826 - protein, 330 aa, Arabidopsis thaliana
MGDTSPRTSVSTDGDTDHNNLMFDEGHLGIGASDSSDRSKSKMDQKTLRRLAQNREAARKSRLRKKAYVQQLENSRLKLTQLEQELQRARQQGVFISSSGDQAHSTAGDGAMAFDVEYRRWQEDKNRQMKELSSAIDSHATDSELRIIVDGVIAHYEELYRIKGNAAKSDVFHLLSGMWKTPAERCFLWLGGFRSSELLKLIASQLEPLTEQQSLDINNLQQSSQQAEDALSQGMDNLQQSLADTLSSGTLGSSSSGNVASYMGQMAMAMGKLGTLEGFIRQADNLRLQTYQQMVRLLTTRQSARALLAVHNYTLRLRALSSLWLARPRE

SEQ ID NO: 18827 - protein, 238 aa, Streptomyces atroolivaceus
MSRPVIGIASYRDRARWNIWDTDATVLQQGYVDGVRRAGGRAVVLPPDDTDADVVARLDGLLLPGGADVDPARYGAARHPRTDTPSADRDAGELLLLEAALAAGLPVLGVCRGLQLLALAYGGTLHQHLPDLVGHSGHCPAEGVFGRHPVHLVPGSRAAALYGELAEVNSHHHQAVLDPGGLHVTGRGEDGVVEAAEDPSRPFVLGVQWHPEVSDDRKLFAAFVAACTTRSLHTAASV

SEQ ID NO: 18828 - protein, 273 aa, Anabaena variabilis ATCC 29413
MGVSIAITRGSGGYQAFTSSGTWAKPSGITTVIVECYGGGGGGRGGGNTNAGGGGGGGSCTRRIFSAGELPSTVAITIGAGGVGGNGSTSSIGSTGASGGSSSFGNFLIAYGGASPSSNGGGGASSLQPGLGTGVASAPDGTSDTSPGLFGGGGGGRNNGNSGNASVYGAPGGGAGGTSTTTTGGTGGSSTLPASGGIGGTGGGAGGNNGNNGTDLTTGAGTGGGGGGYGTTTGGNGGNGGAPGAGGGSGAAGGTTGGNGGNGGRGEVRIWWS

SEQ ID NO: 18829 - protein, 268 aa, Glycine max
MAESANSIHNSGQKKLAGKVAIITGGASGIGEETARLFAHHGARMVVIADIQDDLGIQVAASIGSHRCSYVRCDVTDEDQVKNLVDSTVNAHGQLDIMFSNAGILSPSDQTILDLDFSAYDRLLAVNARGTAACVKHAARSMVERRVRGSIVCTASVSASHGGLRRTDYVMSKHAVKGLMRAASAQLGAHGVRVNCVSPSGLTTPLTRAAHAAMETKELQKQYAQSSRLKGVFLTPKHVADAVLFLACGDSEFVTGHDLVVDGCFDGV

SEQ ID NO: 18830 - protein, 109 aa, Glycine max
  unsure (1)..(109): unsure at all Xaa locations
ISTEKASTAVFQVNGSALVEHTCLCVNALQGFIGFHIKWFPXKSGYEGFTHLLMVYDDKLAYVLCVFFLAVGLDSESIIFSGKTLGKIVFYRGSNDFGWDIIFESDGYD

SEQ ID NO: 18831 - protein, 444 aa, Shigella flexneri 2a str. 2457T
MGLVKQGARVAVIERYQNVGGGCTHWGTIPSKALRHAVSRIIEFNQNPLYSDHSRLLRSSFADILNHADNVINQQTRMRQGFYERNHCEILQGNARFVDEHTLALDCPDGSVETLTAEKFVIACGSRPYHPTDVDFTHPRIYDSDSILSMHHEPRHVLIYGAGVIGCEYASIFRGMDVKVDLINTRDRLLAFLDQEMSDSLSYHFWNSGVVIRHNEEYEKIESCDDGVIMHLKSGKKLKADCLLYANGRTGNTDSLALQNIGLETDSRGQLKVNSMYQTAQPHVYAVGDVIGYPSLASAAYDQGRIAAQALVKGEATAHLIEDIPTGIYTIPEISSVGKTEQQLTAMKVPYEVGRAQFKHLARAQIVGMNVGTLKILFHRETKEILGIHCFGERAAEIIHIGQAIMEQKGGGNTIEYFVNTTFNYPTMAEAYRVAALNGLNRLF

SEQ ID NO: 18832 - protein, 445 aa, Staphylococcus epidermidis ATCC 12228
MSKVNHLIDEDERYFAHSGRIKYYPLVIDHGYGATLIDIDGKSYIDLLASASSQNVGHAPKPVVEAIKNQTEKFIHYTPAYMYHEPLVRLSKKLCDIAPGNYEKRVTFGLSGSDANDGIIKFARAYTGRPYIISFTNAYHGSTFGSLSMSSISLNMRKRYGPLLNGFYHIPFPDKYRGMFEQAKPNTVEEYLAPLKEMFTKYVPAEEVACIVVETIQGDGGLLEPVPGYFEALQELCHAHNILIAVDDIQQGLGRTGKWSSVDHYHFTPDLMTFGKSLAGGLPMSAIVGRKEIMESLEAPAHLFTTGANPVSCEAALATIKMIEDEDLLNASWKKGSYVRKRIDPWIERYQYVGDVRGIGLSIGIDIVSNKIEKTRDSEAALKICNYCFENGVIIIAVAGNVLRFQPPLVITYKQLDKALDTIEEALEKLERGELNQYDISGQGW

SEQ ID NO: 18833 - protein, 379 aa, Cardamine amara
MITTGQIIRCKAAVSWEAGKPLVMEEVEVAPPQKHEVRIKILFTSLCHTDVYFWEAKGQTPLFPRIFGHEAGGIVESVGEGVTDLQPGDHVLPIFTGECGDCPHCHSEESNMCDLLRKNTDRVGMIHDGVSRFSINGKPIHHFLGTSTFSEYTMVHSGQVAKINPEAPLDKVCIVSCGLSTGLGATLNVAKPKKGQSVAVFGLGAVGLAACEGARMSGASRIIGVDLNPKRFEEAKKFGVTEFVNPREHDKPVQQVIAEMTNGGVDRSVECTGSVQAMIQAFECVHDGWGVAVLVGVPSKDDAFKTHPMNFLNERTLKGTFFGNYKPKTDIPGVVEMYMNKELEIEKFITHTVPFSEINKAFDYMLKGESIRCIITMGA

SEQ ID NO: 18834 - protein, 379 aa, Arabis blepharophylla
MITTGQIIRCKAAVAWEAGKPLVMEEVEVAPPQKHEVRIKILFTSLCHTDVYFWEAKGQTPLFPRIFGHEAGGIVESVGEGVTDLAPGDHVLPIFTGECGDCPHCHSEESNMCDLLRINTERGGMIHDGESRFSIDGKPIYHFVGTSTFSEYTVIHSGQVAKINPDAPLDKVCIVSCGLSTGLGATLNVAKPKKGQSVAIFGLGAVGLAAAEGARIAGASRIIGVDLNSKRFDEAKKFGVTEFVNPKDHDKPVQQVIAEMTDGGVDRSVECTGSVQAMIQAFECVHDGWGVAVLVGVPSKDDAFKTHPMNFLNERTLKGTFFGNYKPKTDIPGVVEQYMNKELEIEKFITHTVPFSEINKAFDYMLKGEGNRCIIRMGA

SEQ ID NO: 18835 - protein, 251 aa, Sinorhizobium meliloti 1021
MSKPVVAIPCDFREFDGNVWHVAAHQYVRAAVEGAGLMVFLVPALEAGNDVDEILDRVDGVLASGARSNVHPSLYGREASEADGPFDPGRDATSLPLIRRALDRGVPLFAICRGIQELNVALGGTLASEIQEQPGIWDHRKPEVPDLDVAYGIRQDVVVKEGSCLAPVLGTGRVRVNSLHRQAIGAAAPRLAVEAVADDGTIEAVSVIGAKAFAVGVQWHPEYWVRTDAPSAALFKAFGDAARAYCESKAS

SEQ ID NO: 18836 - protein, 379 aa, Arabis blepharophylla
MSTTGQIIRCKAAVAWEAGKPLVMEEVEVAPPQKHEVRIKILFTSLCHTDVYFWEAKGQTPLFPRIFGHEAGGIVESVGEGVTDLAPGDHVLPIFTGECGDCPHCHSVESNMCDLLRINTERGGMIHDGESRFSIDGKPIYHFVGTSTFSEYTVIHSGQVAKINPDAPLDKVCIVSCGLSTGLGATLNVAKPKKGQSVAIFGLGAVGLAAAEGARIAGASRIIGVDLSSKRFDEAKKFGVTEFVNPKDHDKPVQEVIAEMTDGGVDRSVECTGSVQAMIQAFECVHDGWGVAVLVGVPSKDDAFKTHPMNFLNERTLKGTFFGNYKPKTDIPGVVEMYMNKELEIEKFITHTVPFSEINKAFDYMLKGEGIRCIITMGA

SEQ ID NO: 18837 - protein, 547 aa, Mycobacterium avium subsp. paratuberculosis str. k10
MVANSRAGQPAQPEDLVDLPHLVTAYYSIQPDPGDVAQQVAFGTSGHRGSALAGAFNEAHILAITQAIVEYRAAHGISGPLFIGRDTHGLSEPAWVSALEVLAANDVVVMIDSRDRYTPTPAVSHAILSYNRGRTEALADGIVVTPSHNPPSDGGFKYNPPNGGPADSDVTNAIAKRANEILRDGAGVKRVPLARARRAAQRHDYLGNYVDDLPNVVDIDAIRSAGVRIGADPLGGASVDYWGEIAERHNLDLTVVNPLVDATWRFMTLDHDGKIRMDCSSPDAMAGLIRTVTAEPGRFQIATGNDADSDRHGIVTPDGGLLNPNHYLAVAIEYLYTQRPSWPGGIAVGKTAVSSSMIDRVVAGLGRKLIEVPVGFKWFVDGLIGGTLGFGGEESAGASFLRRDGSVWTTDKDGIILALLASEILAVTGSSPSQRYQRLTAQYGTPCYARVDAPADRDQKARLSKLSAEQVTATELAGEPITAKLTAAPGNDAPLGGLKVTTANAWFAARPSGTEDVYKIYAESFHGPQHLAEVQETAREVVNKVIG

SEQ ID NO: 18838 - protein, 496 aa, Mycobacterium bovis AF2122/97
MSLLITSPATVAAAATHLAGIGSALSTANAAAAAPTTALSVAGADEVSVLIAALFEAYAQEYQALSAQALAFHDQFVQALNMGAVCYAAAETANATPLQALQTVQQNVLTVVNAPTQALLGRPIIGNGANGLPNTGQDGGPGGLLFGNGGNGGSGGVDQAGGNGGAAGLIGNGGSGGVGGPGIAGSAGGAGGAGGLLFGNGGPGGAGGIGTTGDGGPGGAGGNAIGLFGSGGTGGMGGVGGMGGVGNGGNAGNGGTAGLFGHGGAGGAGGIGSADGGLGGGGGNGRFMGNGGVGGAGGYGASGDGGNAGNGGLGGVFGDGGAGGTGGLGDVNGGLAGIGGNAGFVGNGGAGGNGQLGSGAVSSAGGMGGNGGLVFGNGGPGGLGGPGTSAGNGGMGGNAVGLFGQGGAGGAGGSGFGAGIPGGRGGDGGSGGLIGDGGTGGGAGAGDAAASAGGNGGNARLIGNGGDGGPGMFGGPGGAGGSGGTIFGFAGTPGPS

SEQ ID NO: 18839 - protein, 765 aa, Nostoc sp. PCC 7120
MRIDVESQNINVTSLKEAPIHLSGQIQPHGVLLVLEEPGLKILQVSNNTWGILGINAENILQKKLEDLLDSFQIERIQSGLSSGNLEFINPTKIWIRKKGDDYAVFDAVFHRNTEGFLILELEPAITQENIPFLSFYHLAKASINQLQKTANLRDFCQIIVQEVRKVTDFDRVMLYKFDDDGHGSVIAEEKLDSLEPYLGLHYPESDIPKPARKLFISNSIRVIPNAQAQAIQMIPALNPVSDRPVDLTNSILRSAANCHLEYLHNMGVGASLTISLIKDNKLWGLIACHHLSAKYVSYELRKACEFLGRVIFAEISAREETEDYDYRMNLTHIQSLLVEYMSQEDNFVDGLIKHQPSLLDLTSAQGAAVCFGDHCTLIGETPKAEDLVFLVQWLKNNVEEEVFYTDSLPQVYPDAERYKNVASGLLAIPISQRNYVLWFRPEVIQTVNWGGDPNQPFEVNKLDGNVRLCPRKSFELWKETVRLTSLPWRYVEIRAALELRKAIVNIVLRQADELAQLAHDLERSNAELKKFAYVASHDLQEPLNQVANYVQLLEMRYQDQLDADANEFITFAVEGVSLMQTLIDDVLAYSKVDTQAIAFQLTEVEKALDKALGNLRQRIAETGANITHDPLPTVMAGSTQLMQLFQNLIANAIKFRSEEAPQIHIGAERLEDEWLFSVRDNGIGIDPQFSDRIFVIFQRLHTRDEYHGTGMGLAICKKIIECHRGRIWVESQLGEGATFYFTIPVGGRERERRNGRKTQNNLFS

SEQ ID NO: 18840 - protein, 402 aa, Oryza sativa
MAIVSRSRRLAVTLLLLLLLFAVVAAAAVATKTEAGTEDAASKEDESWTGWAKEKITEGLGLKHHVTDVDEEEDAARKAGHAAKSAQHTASEAGRQTSKKAGDAKEAAEATASGASSKAEQAKETTKEAAKGAAGEATRRAEQAKHKTKEAAEAAGERGAEVHEQSKQGKAKVEETAKEKAGEGYDAAKDKAGKAQETLRQSTDAAKDKAGKAQETLRQSTDAARDKAGKAQETLRQSTDAAAEKAGAAKDSAWERTSSAKDAAAEKAGSAKDAAWEKTSSAKDAAAEKAGAAKDAAREKAEAAGEKARQSKEAAKGKAGAAKDAAWEKAEAAKDAAWETAEAAREKANEGYEKVKEKAKEKVEEVKERVTGADDAADHGKEKKHHHRHVDGKQKPRTVDEL

SEQ ID NO: 18841 - protein, 382 aa, Zea mays
LLLQGASERGAKRIRVHVLTDGRDVADGSSVRFVEMLEEDLARLREKGVDARIASGGGRMYVTMDRYENDWQVVKRGWDAHVLGEAPHRFRSALEALRKLREEDPKKASDQYLPPFVVVDGSGEPVGPVRDGDAVVTFNFRADRMVMLAKALEYEGFDRFDRVRFPRTRYAGMLQYDGELKLPRHYLVAPPEIQRTSGEYLARNGVRTYACSETVKFGHVTFFWNGNRSGYFDQNLEKYEEIPSDAGIPFNVQPKMKALEIAQKARDAILSQKFDQIILDAVEQVGGVFVVTADHGNAEDMAKRDKSGEPLRDKDGKVQTLTSHTLNPVPIAIGGPGLAPGVRFRTDLASAGLANVAATVMNLHGFQAPDHYEPTLIQVVDE

SEQ ID NO: 18842 - protein, 400 aa, Campylobacter jejuni subsp. jejuni NCTC 11168
MFDEIRFNTIERLPNYVFAEVNAIKMAARRAGEDIIDFSMGNPNGKTPQHIIDKLCESANKDKTSGYSTSMGIYKLRLAICNWYKRKYNVNLDPENEVVATMGSKEGFVNLARAIINPGDVAIVPTPAYPIHTQAFIIAGGNVAKMPLAYNEKFELDENQFFENLHKTLNESIPCPKYVVVNFPHNPTTVTCEKSFYERLIATAKKERFYIISDIAYADLTYDDYKTPSILEIEGAKDVAVETYTLSKSYNMAGWRVGFVVGNKRLVSALKKIKSWFDYGMYTPIQVAATIALDGDQTCVDEIRATYDKRMHILLEAFENAGWKLQKPRASMFVWAKLPESKRHLKSLEFSKQLLQRASVAVSPGVGFGEAGDEYVRIALIENENRIRQAARNIKKYLKE

SEQ ID NO: 18843 - protein, 428 aa, Thermobifida fusca
MSAALVMLMTPGLAFFYGGMARAKSVLNMMLMSFTSIAIVSVLWVLVGYSLTYSPGYGPLTHLIGGLGDFGSSGFVNAVDEEGGYPLLVDVGFQMMFAIITVALISGAIADRAKFGAWLLFVPLWSLFVYFPVARWVWGGGWFDQLADWFGASVVDFAGGTAVHINAGAAALALTFVLGRRKGFGSESMRPHNLPFVLLGAALLWFGWFGFNAGSAYGANETASLALVNTQVCTAAATAAWMLVERVRYGKVTALGFASGAVAGLVAITPAAANLTPVWAVVLGLVAGAVCAYAISWKFKFKYDDALDVVGIHMVGGIIGSLALGVFASATVGEGAPDGILFGGSPMFLLVQFIAVAATTLYSFAVTWLIAKAIDMAMGFRLPEHVETNGLDTELHAQSAYAFDELDTVELSSSLPPGEEKPSAQVRV

SEQ ID NO: 18844 - protein, 77 aa, Triticum aestivum
  unsure (1)..(77): unsure at all Xaa locations
ARRRHRRQSGGRVQPSTAAASLSLNTAARFAVAMVVLDAWQYFMHRXMHSSRYMYRRFHSWHHRVVAPYAFAAQYNH

SEQ ID NO: 18845 - protein, 332 aa, Psychrobacter sp. 273-4
MMSDKQIPKTQHAVLICEFGAPEVMTYQDDVAVPELTDDQVLVKIAYAGINPVDYKTRQGKGWGAANIKKDKFDHNQPAILGFDMSGTVVKSRSTDFVVGDKVAALTFNGGCYAEYVAVDAKMLARVPKTVTLEQAGALPCIGQTALQFVEFADIKEGEHVVMNAPAGGVGHLLIQLLIDKVAKNNVKVTLICSAEKYEKLDSLIDTSQLAGWIDYTKDETFPELQADVLLDLVGDEAGVRALNVVKDSGRVYVLPTIWVDKLKEAGSQKNLSVEGYAAQRNGEDMARVLQLVADGQLTLRLQKTYPLAEVIAAHHELQKGDAFGKLVLKVS

SEQ ID NO: 18846 - protein, 795 aa, Streptomyces atroolivaceus
MVALVFPGQGSQRKGMGADLFARFPDLTRQADTVLGHSVEELCRSSGDGRLDRTEYAQPALFVVSALSYLARDPGLPQPTLLAGHSLGEYGALFAAGCFDFATGVRLVRERGALMGRAQGGGMLAVLGVDGDEVQALLAGTGARQVDVANYNTPTQTVLSGPLDELRMVSAALGQRPGVRCVPVRVSAAFHSRHMRPAAQEFATFLTGFSFADPHRTVISSVTARPYGAGQVAELLSRQIESPVRWSETMAYLRERGTTELEEMGPGKVLTGLWKQGRADGAKARAVAPAPVAVVAGVPAAAAARAPASPAPVAARAATAAPARPSDPAPPAPRTAPSPASPVPPASVSRGQRAEELGSAEFRQDYGIRYAYLAGAMFRGIASAELVIRMGRAGLMGFFGAGGLGLDKVESALVRIKDALGPDGRYGMNLLHSIDDPAYEHAVVDLCLKHGVHDVEAAGFTQLTPAVVQFRFSGAHRDAAGRAVAVRRVLAKVSRPEVAAAFMAPAPAAILRRLTADGRLTPQEAEIAAELPVGQDICVEADSGGHTDGGAALTLLPSMIRHRDAAMARHGYGRRIRIGAAGGIGAPEAVAAAFVLGADFVLTGSVNQCSPEAGTSDAVKDILAGLDVQDTAYAPAGDMFEIGARVQVVRKGTLFAARGNKLYQLYRSHDSWESIDAGTRRSVEETYFKRPFAEVWEETRAYHLGRGRDAEIEKADRLPKHRMALAFRWYFARSVRWGLEGEPTQKVNYQIQCGPAIGAFNHVVRGTGLEDWRHRHVDLIAEHLMTGAADVLARR

SEQ ID NO: 18847 - protein, 188 aa, Schizosaccharomyces pombe
MTILQSILFVTGNKHKLADVKNILGDRFEIKNHDYDLPEIQGSVKEVVLEKCKAAAEIVKGPVLVEDTWLGYKAMNGLPGPYVKWFLNSVGPDGLYRMVSAFDTKEAQAGCTFGYTKGPGKPIHLFEGILDGQVVPPRGSNGFGWNSIFQPNGHKHTYAEMTDEERNSCSHRYLAAMKLRDFLESEKN

SEQ ID NO: 18848 - protein, 365 aa, Chlamydophila caviae GPIC
MITEVRIPNVAESISEVTIASLLVTSESLVQENQGIMEIESDKVNQLIYAPTSGRIVWSVSEGDVVAVGGGVAKIYDANEAVPESAIENTSSSESVDAEIICFPRSKAHEPPAEGKTFVPLRDKIQNAPQPAGSKNEVREHMSSIRKTISRRLVSALHESAMLTTFNEIHMTPLMKLRKEKQESFSSRYNVKLGLMSFFIKAVIEGLKAYPRVNAYIEGDEIVYRQYYDISIAVGTERGLVVPVIRDCDKLSSGDIEVKLADLAGRARDGQISIPELEGGSFTITNGGVYGSLLSTPIINPPQVGILGMHKIEKRPVVLDNTIVIADMMYVAFSYDHRMIDGKEAVGFLIKIKDAIEQPETLLDL

SEQ ID NO: 18849 - protein, 379 aa, Brassica oleracea
  unsure (1)..(379): unsure at all Xaa locations
MSTTGQIIRCKAAVCWEAGKPLVMEEVEVAPPQKHEVRIKILFTSLCHTDVYFWEAKGQTPLFPRIFGHEAGGIVESVGEGVTDLXPGDHVLPIFTGECGDCPHCHSEESNMCDLLRINTERGGMIHDGESRFSINGKPIHHFLGTSTFSEYTVVHSGQVAKINPEAPLDKVCIVSCGLSTGLGATLNVAKPKKGQSVAIFGLGAVGLAAAEGARIAGAGRIIGVDLNPKRFEEAKKFGVTEFVNPKEHDKPVQEVIAEMTNGGVDRSVECTGSIQAMIQAFECVHDGWGVAVLVGVPSKDDAFKTHPMNLLNERTLKGTFFGNYKPKTDIPGVVEKYMNKELELEKFITHTVPFSEINKAFDYMLKGESIRCIITMGA

SEQ ID NO: 18850 - protein, 463 aa, Glycine max
MASSFLSAASHAVSPSCSLSTTHKGKPMLGGNTLRFHKGPNSFSSSRSRGRISMAVAVNVSRFEGIPMAPPDPILGVSEAFKADNSDVKLNLGVGAYRTEELQPYVLNVVKKAENLMLERGDNKEYLPIEGLAAFNKATAELLLGADNPAIKQQRVATVQGLSGTGSLRLGAALIERYFPGAKVLISAPTWGNHKNIFNDASVPWSEYRYYDPKTVGLDFEGMIEDIKSAPEGSFILLHGCAHNPTGIDPTPEQWEKIADLIEEKNHIPFFDVAYQGFASGSLDEDAASVRLFVARGIEVLVAQSYSKNLGLYAERIGAINVISSSPESAARETSQLKRIARPMYSNPPVHGARIVADVVGNPVLFNEWKAEMEMMAGRIKNVRQQLYDSITSKDKSGKDWSFILKQIGMFSFTGLNKNQSDNMTNKWHVYMTKDGRISLAGLSLAKCEYLADAIIDSYHNVS

SEQ ID NO: 18851 - protein, 379 aa, Arabis drummondii
MSTTGQIIRCKAAVAWEAGKPLVMAEVEVAPPQKHEVRIKILFTSLCHTDIYFWEAKGQTPLFPRIFGHEAGGIVESVGEGVTDLQPGDHVLPVFTGECGDCRHCHSEESNMCDLLRINTERGVMIHDGESRFSINGKPIYHFVGTSTFSEYTVVHSGQVAKINPDAPLDKVCIVSCGLSTGLGATLNVAKPKKGQSVAIFGLGAVGLAAAEGARIAGAFRVIGVDLNPKRFDEAKKFGVTEFVNPKDHDKPVQQVIAEMTDGGVDRSVECTGSVQAMIQAFECVHDGWGVAVLVGVPSKDDAFKSHPMNFLNERTLKGTFFGNYKPKTDIPGIVEMYMNKELELEKFITHTVPFSGINKAFDYMLKGESIRCIIPMGA

SEQ ID NO: 18852 - protein, 379 aa, Arabis drummondii
  unsure (1)..(379): unsure at all Xaa locations
MITTGQIIRCKAAVAWEAGKPLVMEEVEVAPPQKHEVRIKILFTSLCHTDVYFWEAKGQTPLFPRIFGHEAGGIVESAGEGVTDLQPGDHVLPVFTGECGDCRHCHSEESNMCDLLRINTERGVTIHDGESRFSINGKPIHHFVGTSTFSEYTVVHSGQVAKINPDAPLDKVCIVSCGLSTGLGATLNVAKPKKGQSVAIFGLGAVGLAAAEGARIAGASRVIGVDLNPKRFDEAKKFGVTEFVNPKDHDKPVQQVIAEMTDGGVDRSVECTGSVQAMIQAFECAHDGWGVAVLVGVPSKDDAFKSHPMNFLNERTLKGTFFGNYKPKTDIPGIVEMYMNKELELEKFITHTVPFSEINKAFDNMXKGESIRCIITMGA

SEQ ID NO: 18853 - protein, 502 aa, Oryza sativa
LAAFLAAAAVLFALRLLHSFLWVPRRLERRFRRQGIRGPPRRPLSGNAAGYRDLLAAAQSAPLASFHHAVVARVAPHHREWPERYGRPFVFWLGPRPRLVVSDPEVVKAVLTDTTGTFGKAGPGGNNPLARQLFSEGLVGLTGEAWARHRRVIAPAFNMERVKAWIPEITSITSSMLDKWELQDEVRTEFEIDVNKEFHTLIADVISCVAFGSSYEEGKRVFQLQEEQLKLVILAMRTVYIPGFRFVPTKKNQRRKIVNQEIRNSLRKLIEINGRKCEDSNNLLGMMLSASKIDSEFKMGIEEIIDECKTFYFAGKETTATLLTWATLLLALHQEWQNKARDEVLQVCGKYEHPKAENLSELKIVNMVLKETLRLYPPAVFLNKIANRDVKLGKLDIPAGTQLQLPILDIHHDVSIWGADADEFDPSRFAEGKSYHLGAYFPFGIGPTICVGQNLAMVEAKVALAMILQRFALVVSPSYVHAPMLVVTLQPQYGAQVLVHKI

SEQ ID NO: 18854 - protein, 299 aa, Oryza sativa
YFVGQAAAAGGWFLPDRRGGGGAWSQEENKVFEQALAALDRNDPERWERVALLLPGKTVADVMTHYDDLENDVCFIEAGLVPFPHYGAAGGGGGSGFTLDWDGGDDPAGLGFKRSCYMVGGKRGRGPDQERKKGVPWTEEEHKSFLMGLKKYGRGDWRNISRYFVTSRTPTQVASHAQKYFIRLNSGGKDKRRSSIHDITTVNLPEEDTSNPSPSPPPSVLTAHSSSSAAAVSEQFGVLVDGKPPPPPLGRGAGHHHFMPHPYAQVKIEKNNSHITGGGRLDDSVLVQMQCGQLMQPLG

SEQ ID NO: 18855 - protein, 196 aa, Triticum aestivum
  unsure (1)..(196): unsure at all Xaa locations
MAPTVMASSATSVAPFQGLKSTAGLPVSRRSNGASLGSVSNGGRIRCMQVWPIEGIKNSETLSYLPPLNTEXLLKQVDYLIXRSKWVPCLQFNKVGLSSRLSTTHPLGYYDGRYWXTMWKLPMXFGCTDPPSVNKVEEXKKXIPDAYFRIIXSTNRKAQIAHGRSGKAKNITRHIKAGFRILGFLHYFCFQKKVSQ

SEQ ID NO: 18856 - protein, 379 aa, Olimarabidopsis pumila
MITTGQIIRCKAAVAWEAGKPLVMEEVEVAPPQKHEVRIKILFTSLCHTDVYFWEVKGQTPLFPRIFGHEAGGIVESVGEGVTDLQPGDHVLPIFTGECGDCRHCHSEESNMCDLLRINTERGGMIHDGESRFSINGKPIHHFLGTSTFSEYTVVHSGQVAKINPDAPLDKVCIVSCGLSTGLEATLNVAKGKKGQSVEIFGLGAVGLAAAEGARIAGASRIIGVDLNSKRFDQAKEFGVTEFVNPRDHDKPVQQGIAEMTDGGVDRSVECTGSVQAMIQAFECVHDGWGVAVLVGVPSKDDAFKTHPMNLLNERTLKGTFFGNYKPKTDIPGVVEKYMNKELELEKFITHTVPFSEINKAFDHMLKEESIRCIITMGA

SEQ ID NO: 18857 - protein, 450 aa, Escherichia coli O157:H7
MTKHYDYIAIGGGSGGIASINRAAMYGQKCALIEAKELGGTCVNVGCVPKKVMWHAAQIREAIHMYGPDYGFDTTINKFNWETLIASRTAYIDRIHTSYENVLGKNNVDVIKGFARFVDAKTLEVNGETITADHILIATGGRPSHPDIPGVEYGIDSDGFFALPALPERVAVVGAGYIAVELAGVINGLGAKTHLFVRKHAPLRSFDPMISETLVEVMNAEGPQLHTNAIPKAVVKNADGSLTLELEDGRSETVDCLIWAIGREPANDNINLEAAGVKTNEKGYIVVDKYQNTNVEGIYAVGDNTGAVELTPVAVAAGRRLSERLFNNKPDEHLDYSNIPTVVFSHPPIGTVGLTEPQAREQYGDDQVKVYKSSFTAMYTAVTTHRQPCRMKLVCVGPEEKIVGIHGIGFGMDEMLQGFAVALKMGATKKDFDNTVAIHPTAAEEFVTMR

SEQ ID NO: 18858 - protein, 379 aa, Arabidopsis halleri
MITTGQSIRCKAAVAWEAGKPLVMEEVEVAPPQKHEVRIKILFTSLCHTDVYFWEAKGQTPLFPRIFGHEAGGIVESVGEGVTDLQPGDHVLPIFTGECGDCPHCHSEESNMCDLLRINTERGGMIHDGESRFSINGKPIHHFLGTSTFSEYTVVHSGQVAKINPDAPLDKVCIVSCGLSTGLGATLNVAKPKKGQSVAIFGLGAVGLAAAEGARIAGASRIIGVDLNSQRFDQAKEFGVTEFVNPRDHDKPVQQVIAEMTNGGVDRSVECTGSVQAMIQAFECVHDGWGVAVLVGVPSKDDAFKTHPMNFLNERTLKGTFFGNYKPKTDIPGVVEKYMNKELELEKFITHTVPFSEINKAFDYMLKGESIRCIITMGA

SEQ ID NO: 18859 - protein, 379 aa, Arabis hirsuta
MITTGQIIRCKAAVAWEAGKPLVMEEVEVAPPQKHEVRIKILFTSLCHTDVYFWEAKGQTPLFPRIFGHEAGGIVESVGEGVTDLAPGDHVLPVFTGECGDCPHCHSEESNMCDLLRINTERGGMIHDGESRFSIDGKPIYHFVGTSTFSEYTVVHSGQVAKINPDAPLDKVCIVSCGLSTGLGATLNVAKPKKGQSVAIFGLGAVGLAAAEGARIAGASRIIGVDLNSKRFDEAKKFGVTEFVNPKDHDKPVQQVIAEMTNGGVDRSVECTGSVQAMIQALECVHDGWGVAVLVGVPSKDDAFKTHPMNLLNERTLKGTFFGNYKPKTDIPGVVEKYMNKELELEKFITHTVPFSEINKAFDYILKGESIRCIITMGA

SEQ ID NO: 18860 - protein, 195 aa, Staphylococcus aureus subsp. aureus MW2
MKEIVIASNNQGKINDFKVIFPDYHVIGISELIPDFDVEETGSTFEENAILKSEAAAKALNKTVIADDSGLEVFALNGEPGIYSARYAGENKSDEANIEKLLNKLGNTTDRRAQFVCVISMSGPDMETKVFKGTVSGEIADGKYGENGFGYDPIFYVPKLDKTMAQLSKEQKGQISHRRNAINLLQAFLEGDKNV

SEQ ID NO: 18861 - protein, 112 aa, Glycine max
  unsure (1)..(112): unsure at all Xaa locations
MSRRYDSRTTIFSPEGRLYQVEYAMEAIGNAGSALGILAADGVVLVGEKKVTSKLLQSSRSAEKMYKIDSHLACAVAXGIMSDANILINTARLHAQRYALSYQEPIPVEQLV

SEQ ID NO: 18862 - protein, 486 aa, Bordetella parapertussis 12822
MEDLRNHEFKNYIGGQWVACAAGKTYPNVNPADTDDIVGRFQASQAEDAAAAVAAAQAAFDGWRNLAVSKRAALMQRAADYLEAHAEQFGRELTREEGKALNLAKDEVLRSAQTIRFYAAEGQSFSGETFVNDDPDMVVYSQREPLGVVTVISPWNFPVSIPARKIAPALITGNTVVFKPSSDAPLSGLRLVEAFEQAGLPPGVLNLVTGSASAIGAAITQAPQVRAVSFTGSTAAGEQIHRSVDMTTRTQMELGGKNPLIVMADADLDRAVDLVVKGGFSLSGQACTGTSRVLVDAPVKAAFTEKLLAKVKALKVGNSLEGSFDLGPLATARQLESVMRYIEVGKQEARLLYGGERLDGPGYERGYYLTPAVFADVTQQMRIAREEIFGPVIALIEVNGYEDAIAKANDTEYGLAAAIATTNAQYAHRFARDIQAGTVKINRTTTGNLINAPFGGLKRSSTSTFRESGRIGLEFYTQIKTVYRAG

SEQ ID NO: 18863 - protein, 469 aa, Methanosarcina acetivorans C2A
MLKNVQKLGKFLIIICMIFIALSSPAFAATAEENAVAIEGVQTALTFVWLLLASGLVFFMHAGFSLVETGLTRSKNTANILMKNFMTIVLGILIYWAVGWGVMYGADAAGLIGTDQFFLSGADNALWNGWFFQMVFAATGATIVSGAMAERTNFKAYLIYCIMMVAVIYPVYGHWVWSGADLALLTGADSPIVQAIGVPSHDFAGSGVVHSIGGYSALAGVLLVGARIGKFKDGKAVPIPGHNLTIAFLGTLILALGWIGFNGGSTLDGNDPYMNLVVVNTFLAAAAGAVVTMLITWMKTGKPDPSLTANGLLGGLVAITAPCGSVNNWAAIIIGAIAGIIIYAGVMFNENTLKVDDPVGAIAVHGYCGSWGLISVGLFSIGIGNGILADAAYAAEVPGLFYGGGISLLLIQLISVLCSIVWAFGISFIIFKILDAVVGLRVSEEEEIMGLDICEHGIRAYPEYLMREE

SEQ ID NO: 18864 - protein, 158 aa, Glycine max
  unsure (1)..(158): unsure at all Xaa locations
FLILISKQRLPHDHFPTVTTVNRAGAGLDAPLTGLKSMAGFPTRKXTNNDITSLASNGGRLQCMRGWPPGGKNNLETLSYLPDLDDAQLPKXVEYLLRKGWIPCLEFXLEHGFESREHTRKPGYYHGRYWTMWKLPMFGCTDAPEVLKELQEANTAYP

SEQ ID NO: 18865 - protein, 343 aa, Saccharum officinarum
MAPSSYEMAASILLCAEDSSSILDLEAEAEEEEVMLARSSRTRGDPSVVFPVPSEECVAGFVEAEAAHMPREDYAERLRGGGMDLRVRMDAVDWIWKVHAYYGFGPLTACLAVNYLDRFLSLYQLPEGKAWTTQLLSVACLSLAAKMEETYVPPSLDLQIGDARYVFEAKTIQRMELLVLSTLKWRMQAVTPFSYIDYFLHRLNGGDAPSRRAVLRSAELILCTARGTHCLDFRPSEIAAAVAAAVAGEEHAVDIDKACCTHRVHKERVSRCLEAIQATVALPGTVPRSPTGVLDAAGCLSYRSDDTAVAAAAAASHASSSSWCDEDDDSSPVVCSKRRKISR

SEQ ID NO: 18866 - protein, 369 aa, Haemophilus influenzae R2866
MTQQYAIDTLLAQAGNRSDERTGAVSAPIFLSTAYGHCGIGESTGFDYTRTKNPTRTVLEETIAKLENGDRGFAFSSGMAAIQVLMTLFTAPDEWIVSSDVYGGTYRLLDFSYKNNNSVKPVYVNTAFASEIEAAINPNTKAIFIETPSNPLMEECDVVEIAKLAKKHNLMLIVDNTFLTPVLSRPLDLGADVVIHSGTKYIAGHNDALVGLIVAKGQELCDRIAYIQNGAGAVLSPFDSWLTIRGMKTLSLRMKRHQENAQAIAEFLKDQPQVESVLYPNKGGMLSFRLQDEAWVNTFLKSIKLITFAESLGGTESFITYPATQTHMDIPESERVARGITNTLLRFSVGIEDVEDIKADLLQAFANLK

SEQ ID NO: 18867 - protein, 352 aa, Streptomyces violaceoruber
MKALICPEDGDRLRPFTYSMPKQLVPVANKPILVHCLENVRAIGVEEVAVVVGDRADEVRAVVGDGSAFGLDVTYLQQEAPLGLAHCVSIAEEFLGDEDFVMYLGDNILAEGIAESARAFRDERSAARLLLTKVADPRAYGVAETDATGRVHALVEKPERPRSDLAVIGVYFFTAAVHDAVRAIEPSARGELEITDAIQYLVERGDRVVADEYTGYWKDTGSPDDLLDCNRVLLGRLRPGVHGEVDAASTVEGTVVVEAGRSWSDSRLVGPLVVGAGSVVRGSELGPYTALGRDCVLEDAGIRDSIVLDGVSIQGVRGLSGSLIGRSAAVRTGEAAGRRLIIGDHTQAEVAA

SEQ ID NO: 18868 - protein, 256 aa, Zea mays
  unsure (1)..(256): unsure at all Xaa locations
QCGRRQVIGASLGCRSPSFPXPPSLAAPPVDPDVVLQRVHPSRPDWYEEFYASAMDQGMKSYEAEIAGYKVKLFSHLSPAGKNILELGVGTGPNFKYYASEDGVNVIGVDPNKHMEKYARAAVVSAGLASSSFTSGRGVAEALPAEDNSXWDVVVGTLVLCSVNNIDMALREIKRVLKPGGLYVFIEHVAAPDGTLLRLVQGALDPLQQLVADGCHLTRRTGQSIRDAGFSSLSLDGVRLSNAYIISPHVYGVACK

SEQ ID NO: 18869 - protein, 550 aa, Chromobacterium violaceum ATCC 12472
MAAQRHIDINSTQVWAKLHQHQRATRHMHMRELFELDPQRFQRFSLELDGLLLDYSKNRVTERTLELLFDLARKADLRGWMDRMRSGERINVSENRSVLHTALRLPAGARLDLEGHNVAADVHQVLARLKDFSEQVREGRWLGFAGQPIRDVVNLGIGGSDLGPLVAADALAAYAHPDLKVHFVSNVDGQHLARTLERLNPATTLFIVASKSFTTPETLLNAQAARAWFLQAAGEAQIAKHFVAVSTNEPAVRAFGIDPQHMFGFWDWVGGRYSVWSAIGLPVMLSIGYDNFRAFLDGGHAMDRHFFESPFDANMPVLLALIGIWYNTFYRAHTHAIMPYDHGLRRLPAHIQQLDMESNGKRVGRLGEALDFDTGPVIWGEEGANSQHAFFQLLHQGTRLVPCDFILPLNSHYPLGNQHDVLVANCLAQTEALMRGKNEAEVMRELSHLSGEQLDMLLPQKLFPGNQPSNTLALDRVTPYSMGMLMALYEHKVFVQGVIWGINSFDQWGVEYGKQLARRILPELSGDTGALGHDSSTNGLIRHYRERHGK

SEQ ID NO: 18870 - protein, 193 aa, Ralstonia metallidurans CH34
MGSTGIIRFAPDWAGRHRHGNQHMSDKGTDTKDKEKKAGKKKTASDRIEVRQSGVHGKGVYAIGQIAEGERVIEYKGEHISWKEALKRHPHDPNDPNHTFYFSLDDGDVIDAKFGGNRARWINHACDPNCEAREKKGRVFIHALRDIEPGEELFYDYGLVIDARYTKKLKQEYECRCGSPKCRGTMLAPKDKK

SEQ ID NO: 18871 - protein, 379 aa, Arabis hirsuta
  unsure (1)..(379): unsure at all Xaa locations
MITTGQIIRCKAAVAFEAGKPLVMEEVEVAPPQKNEVRIKILFTSLCHTDVYFWEAKGQTPLFPRIFGHEAGGIVESVGEGVTDLAPGDHVLPIFTGECGDCPHCHSEESNMCDLLRINTERGVMINDGESRFSIDGKPIYHFVGTSTFSEYTVVHSGQVAKINPDAPLDKVCIVSCGLSTGXGATLNVAKPKKGQSVAIFGLGAVGLAAAEGARIAGASRIIGVDLNSKRFDEAKKFGVTEFVNPKDHDKPVQQVIAEMTDGGVDRSVECTGSVQAMIQAFECVHDGWGVAVLVGVPSKDDAYKTHPMNFLNERTLKGTFFGNYKPKTDIPGLVEKYMNKELEIEKFITHTVPFSEINRAFDYMLKGEGIXCKITMGA

SEQ ID NO: 18872 - protein, 324 aa, Glycine max
PEELQRATDNYNRSKFPGQGGYGTVYKGMLPDGTIVAVKKSKEIERNQIKTFVNEVVILSQINHRNIVKLLGCCLETETPILVYEFIPNETLSHHIHRRDNEPSLSWVSRLRIACEVAGAVTYMHFSASIPIFHRDIKPTNILLDSNYSGDRADFGTSRSVPLDKTHLTTAVGGTFGYIDPEYFQSSQFSDKSDVYSFGVVLVELITGRKPISFLYEDEGQNLVAQFISLMKKNQVSEIFDARVLKDARKDDILAVANLAMRCLRLNGKKRPTMKEVSAELEALRKAQSSLQMNHDHEHTTSDIVQECTEESISLSLHLESTSF

SEQ ID NO: 18873 - protein, 379 aa, Arabis hirsuta
  unsure (1)..(379): unsure at all Xaa locations
MSTTGQIIRCKAAVAWEAGKPLVMEEVEVAPPQKNEVRIKILFTSLCHTDVYFWEAKGQTPLFPRIFGHEAGGIVESVGEGVTDLAPGDHVLPIFTGECGDCPHCHSEESNMCDLLRINTERGVMINDGESRFSIDGNPIYHFVGTSTFSEYTVVHSGQVAKINPDAPLDKVCIVSCGLSTGLGATLNVAKPKKGQSVAIFGLGAVGLAAAEGARIAGASRIIGVDLNSKRFDEAKKFGVTEFVNPKDHDKPVQQVIAEMTDGGVDRSVECTGSVQAMIQAFECVHDGWGVAVLVGVPSKDDAFKTHPMNFLNERTXKGTFFGNYKPKTDIPGLVEKYMNKELEIEKFITHTVPFSEINKAFDYMLKGEGIRCIITMGA

SEQ ID NO: 18874 - protein, 112 aa, Glycine max
  unsure (1)..(112): unsure at all Xaa locations
MASSMISSPAVTTVNRAGAGMVAPFTGLKSMAGFPTXKTNNDITSIASNGGRVQCMQVWPPVGKKKFETLSYLPDLDDAQLAKEVEYLLMKGWIPCLEIQLEQRFVFREPHQ

SEQ ID NO: 18875 - protein, 379 aa, Arabis jacquinii
MITTGQIFRCKAAVAWEAGKPLVMEEVEVAPPQKHEVRIKILFTSLCHTDVYFWEAKGQTPLFPRIFGHEAGGIVESIGEGVTDLAPGDHVLPIFTGECGDCPHCHSEESNMCDLLRINTERGGMIHDGESRFSINGKPIHHFVGTSTFFEYTVVHSGQVAKIIPDAPLDKVCIVSCGLSTGLEATLNVAKPKKGQSVAIFGLGAVGLAAAEGARIAGASRIIGVDLNSKRFDEAKKFGVTEFVDPKDHDKPVQQVIAEMTDGGVDRSVECTGSVQAMIQAFECVHDGWGVAVLVGVPSKGDAFKTHPMNFLNERTLKGTFFGNYKPKTDIPGVVEKYMNKELELEKFITHTVPLSEINKAFDYMMKGESIRCIITMGA

SEQ ID NO: 18876 - protein, 496 aa, Staphylococcus epidermidis ATCC 12228
MELVDKLSNRQYIDGEWVESSNKNTRDIINPYNQETIFTVAEGTKEDVERAILAARRSFEDGEWSLETSEVRGKKVRAVADKIKENREELAKLETLDTGKTLEESYADMDDIHNVFMYFAGLADKDGGEIINSPIPNAESKVVKEPVGVVTQITPWNYPLLQASWKIAPALATGCSLVMKPSEITPLTTIRVFELMEEVGFPKGTINLVLGAGSEVGDVMSGHEEVDLVSFTGGIETGKHIMKQAANHVTDVALELGGKNPNIIFDDADFELAVDQALNAGYFHAGQVCSAGSRILVHNDIKDKFEKALIDRVSKIKLGNGFDQDTEMGPVISTAHRDKIEGYMEVAKKDGATIAIGGKRPEREDLQAGLFFEPTVITDCDTSMRIVQEEVFGPVVTVEGFADEEEAIRLANDSIYGLAGAIFTKDIGKAQRVANKLKLGTVWINDFHPYFAQAPWGGYKQSGVGRELGKEGLEEYLVSKHILTNTNPEPVDWFSK

SEQ ID NO: 18877 - protein, 386 aa, Shigella flexneri 2a str. 2457T
MTRKQATIAVRSGLNDDEQYGCVVPPIHLSSTYNFTGFNEPRAHDYSRRGNPTRDVVQRALAELEGGAGAVLTNTGMSAIHLVTTVFLKPGDLLVAPHDCYGGSYRLFDSLAKRGCYRVLFVDQGDEQALRAALAEKPKLVLVESPSNPLLRVVDIAKICHLAREVGAVSVVDNTFLSPALQNPLALGADLVLHSCTKYLNGHSDVVAGVVIAKDPDVVTELAWWANNIGVTGGAFDSYLLLRGLRTLVPRMELAQRNAQAIVKYLQTQPLVKKLYHPSLPENQGHEIAARQQKGFGAMLSFELDGDEQTLCRFLGGLSLFTLAESLGGVESLISHAATMTHAGMAPEARAAAGISETLLRISTGIEDGEDLIADLENGFRAANKG

SEQ ID NO: 18878 - protein, 418 aa, Lotus japonicus
MDSQNISPSPTASSGSVFAHLVRAPEDPILGVTVAFNKDPSPVKLNLGVGAYRTEEGKPLVLNVVRKAQHQIVNDPSRNKEYLPIVGLADFNKLSAKLIFGADSPAIQENRITTVQCLSGTGSLRVGGEFLAKHYHQRIIYLPKPTWGNHTKVFTLAGLSVKTYRYYAPATRGLDFQGLLEDLGSAPSGSIVLLHACAHNPTGVDPTPEQWEQIRQLIRSKALLPFFDSAYQGFASGNLDADAHSVRSFVADGGELLAAQSYAKNMGLYGERVGALSIVSKSADVASLVESQLKLVIRPMYSNPPLHGASIVATILKDRDLYNEWTIELKGMADRIISMRQQLFDALRSRGTPGDWSHIIKSIGMFTFTGLNPEQVSFMTKEYHIYLTSDGRISMAGLSSKTVPHLADAIHAAVTRAS

SEQ ID NO: 18879 - protein, 435 aa, Bacillus cereus ATCC 10987
MGVITLTTGEKITVTNGVMNVPNNPIIPFIEGDGIGPDIWAAASRVLEAAVEKAYDGEKKIVWKEVLAGEKAFNQTGEWLPEETLNLIREYLIAIKGPLTTPVGGGIRSLNVALRQELDLYVCLRPVRYFEGVPSPVKRPEDTDMVIFRENTEDIYAGIEYAQGSPEAEKVLTFLKEAMGVNKIRFPETSGIGIKPISEEGTKRLVRAAIQYAINEKRSSVTLVHKGNIMKFTEGAFKNWGYEVAEQEFGDKVFTWAEYDRIVEKDGKDAANKAMADAEVAGKIIVKDSIADIFLQQILTRPREFDVVATMNLNGDYISDALAAQVGGIGIAPGANINYVTGHAIFEATHGTAPKYAGLDKVNPSSVLLSGVLLLEHLGWNEAAKLVTASVEKTIASKVVTYDFARLMEGATEVKCSEFANELIKNMDVAIIKNA

SEQ ID NO: 18880 - protein, 489 aa, Spinacia oleracea
EDNHSTVEDDAANYDFDLFVIGAGSGGVRAARFSANLGAKVGICELPFHPISSEVIGGVGGTCVIRGCVPKKILVYGASFGGELEDAKNYGWELNEKIDFNWKKLLQKKTDEIIRLNNIYKRLLSNAGVKLYEGEGKIVGPNEVQVTQLDGTKLSYSAKHILIATGSRAQRPNIPGQELAITSDEALSLEEFPKRVVILGGGYISVEFASIWRGMGADVNLCFRKELPLRGFDDEMRAAVARNLEGRGVNVHPRTTLTELVKTDGGVVARTDHGEEIEADVVLFATGRSPNTKRLNLEALGVELDRTGAVKVDEYSRTSVPSIWAIGDVTNRMNLTPVALMEGTCFAKTVFGGQNSKPDYSNIACAVFSIPPLAVVGLSEEQAIEQASGDILVFTSSFNPMKNTISGRQEKTIMKLVVDAETDKVLGASMCGPDAAEIMQGIAIALKFGATKAQFDSTVGIHPSAAEEFVTMREPSRRVPGAGKPKTNL

SEQ ID NO: 18881 - protein, 339 aa, Salmonella typhimurium LT2
MTIIKSYAAKEAGGELELYEYDAGELQPEDVEVRVDYCGICHSDLSMIDNEWGFSQYPLVAGHEVIGRVAALGSAAQDKGLKVGQRVGIGWTARSCGHCDACISGNQINCQEGAVPTILNRGGFAEKLRAGWQWVIPLPENIDMASAGPLLCGGITVFKPLLMHHITATSRVGVIGIGGLGHIAIKLLHAMGCEVTAFSSNPSKEQEVLAMGANNVVNSRDPEALKALAGQFDLIINTVNVDLDWQPYFEALTYGGNFHTVGAVLKPLPVPAFTLIAGDRSISGSATGTPYELRKLMKFAGRSKVAPTTELFAMSQINEAIQHVRDGKARYRVVLKADF

SEQ ID NO: 18882 - protein, 544 aa, Glycine max
MATSLSVSPSLSLNTLFIAKALPLSRPSFLSLPLPKSLLSLSTRRRTFIVRAESQNGRDPVPAHYDFDLFTIGAGSGGVRARRFAANYGASVAICELPFSTISSETTGVGGTCVIRGCVPKKLLVYASKFSHEFEESNGFGWRYDSEPKHDWSSFIANKNAELQRLTGIYKNILNNAGVKLIEGHGKMIDPHTVDVNGKLYSAKHILVAVGGRPFIPDIPGKELAIDSDAALDLPTKPVKIAIVGGGYIALEFAGIFNGLKSEVHVFIRQKKVLRGFDEEIRDFVEEQMSVRGIEFHTEESPQAITKSADGSFSLKTNKGTVDGFSHIMFATGRRPNTQNLGLESVGVKLAKDGAIEVDEYSQTSVYSIWAVGDVTNRINLTPVALMEGGALVKTLFQDNPTKPDYRAVPSAVFSQPPIGQVGLTEEQAVQQYGDIDIFTANFRPLKATLSGLPDRVFMKLVVCAKTNEVLGLHMCGEDAPEIVQGFAVALKARLTKADFDATVGIHPSAAEEFVTMRTPTRKIRKSESSEGKSGSQAKAAAGV

SEQ ID NO: 18883 - protein, 379 aa, Arabidopsis lyrata subsp. lyrata
  unsure (1)..(379): unsure at all Xaa locations
MITTGQIIRCKAAVAWVAGKPLVMEEVEVAPPQKHEVRIKILFTSLCHTDVYFWEAKGQTPLFPRIFGHEAGGIVESVGEGVTDLQPGDHVLPIFTGECGDCPHCHSEESNMCDLLRINTERGGMIHDGESRFSINGKPIHHFLGTSTFSEYTVVHSGQVAKINPDAPLDKVCIVSCGLSTGLGGTLNVVKPKKGQSVAIFGLGAVGLAAAEGARIAGASRIIGVDLNSQRFDQAKEFGVTEFVNPRDHDKPVQQVIAEMTNGGVDRSVECTGSVQAMIQAFECVHDGWGVAVLVGVPSKDDAFKTHPMNFLNERTLKGTFFGNYKPKTDIPGVVEKYMNKELELEKFITHTLPFSEINKAFDYMLKGESIRCXIPMGA

SEQ ID NO: 18884 - protein, 242 aa, Oryza sativa
MLAKGRKVAGRGGDMSAHYAFGPQEDDAIIKHRLLTRTTTTRGEPPLKKLQKKFMSFATEVEKDADNISDCERLYKAFLQEINAFELPLLKSKAVVDANLREKESFNELQDEIQRQILQAQTDIEDLKKQLEQSKIERQHKEECEAIRKMISLQPPRSETEKLIADLEKEIANLEAENTACIRTLELRKKQFALLLHVVEELQISIDDEQRSIADELRAATEEQKMSIEEVSGGASDAMAVD

SEQ ID NO: 18885 - protein, 461 aa, Mycobacterium tuberculosis CDC1551
MATATTQRPLKGPAKRMSTWTMTREAITIGFDAGDGFLGRLRGSDITRFRCAGRRFVSISHPDYVDHVLHEARLKYVKSDEYGPIRATAGLNLLTDEGDSWARHRGALNSTFARRHLRGLVGLMIDPIADVTAALVPGAQFDMHQSMVETTLRVVANALFSQDFGPLVQSMHDLATRGLRRAEKLERLGLWGLMPRTVYDTLIWCIYSGVHLPPPLREMQEITLTLDRAINSVIDRRLAEPTNSADLLNVLLSADGGIWPRQRVRDEALTFMLAGHETTANAMSWFWYLMALNPQARDHMLTELDDVLGMRRPTADDLGKLAWTTACLQESQRYFSSVWIIAREAVDDDIIDGHRIRRGTTVVIPIHHIHHDPRWWPDPDRFDPGRFLRCPTDRPRCAYLPFGGGRRICIGQSFALMEMVLMAAIMSQHFTFDLAPGYHVELEATLTLRPKHGVHVIGRRR

SEQ ID NO: 18886 - protein, 457 aa, Escherichia coli CFT073
MQKYISEARLLLALAIPVILAQIAQTAMGFVDTVMAGGYSATDMAAVAIGTSIWLPAILFGHGLLLALTPVIAQLNGSGRRERIAHQVRQGFWLAGFVSVLIMLVLWNAGYIIRSMQNIDPALADKAVGYLRALLWGAPGYLFFQVARNQCEGLAKTKPGMVMGFIGLLVNIPVNYIFIYGHFGMPELGGVGCGVATAAVYWVMFLAMVSYIKRARSMRDIRNEKGTAKPDPAVMKRLIQLGLPIALALFFEVTLFAVVALLVSPLGIVDVAGHQIALNFSSLMFVLPMSLAAAVTIRVGYRLGQGSTLDAQTAARTGLMVGVCMATLTAIFTVSLREQIALLYNDNPEVVTLAAHLMLLAAVYQISDSIQVIGSGILRGYKDTRSIFYITFTAYWVLGLPSGYILALTDLVVEPMGPAGFWIGFIIGLTSAAIMMMLRMRFLQRLPSAIILQRAAR

SEQ ID NO: 18887 - protein, 496 aa, Oryza sativa
MARKMLKDEEVEVAVTDGGSYDYDLFVIGAVSGGVRGSRTSASFGAKFAICELPFHPISSDWQGGHGGTCVIRGCVPKKILVYGSSFRGEFEDAKNLGWEINGDINFNWKRLLENKTQEIVRLNGVYQRILGNSGVTMIEGAGSLVDAHTVEVTKPDGSKQRYTAKHILIATGSRAQRVNIPGKELAITSDEALSLEELPKRAVILGGGYIAVEFASIWKGMGAHVDLFYRKELPLRGFDDEMRTVVASNLEGRGIRLHPGTNLSELSKTADGIKVVTDKGEEIIADVVLFATGRTPNSQRLNLEAAGVEVDNIGAIKVDDYSRTSVPNIWAVGDVTNRINLTPVALMEATCFSKTVFGGQPTKPDYRDVPCAVFSIPPLSVVGLSEQQALEEAKSDVLVYTSSFNPMKNSISKRQEKTVMKLVVDSETDKVLGASMCGPDAPEIIQGMAVALKCGATKATFDSTVGIHPSAAEEFVTMRTLTRRVSPSSKPKTNL

SEQ ID NO: 18888 - protein, 441 aa, Arabidopsis thaliana
DAIGITPLYIGWGLDGSVWFASEMKALSDDCEQFMCFPPGHIYSSKQGGLRRWYNPPWFSEVVPSTPYDPLVVRNTFEKAVIKRLMTDVPFGVLLSGGLDSSLVASVALRHLEKSEAACQWGSKLHTFCIGLKGSPDLKAGREVADYLGTRHHELHFTVQDGIDAIEEVIYHVETYDVTTIRASTPMFLMSRKIKSLGVKMVLSGEGSDEIFGGYLYFHKAPNKKEFHEETCRKIKALHQYDCLRANKSTSAWGVEARVPFLDKEFINVAMSIDPEWKMIRPDLGRIEKWVLRNAFDDEKNPYLPKHILYRQKEQFSDGVGYSWIDGLKDHANKHVSETMLMNASFVFPDNTPLTKEAYYYRTIFEKFFPKSAARATVPGGPSVACSTAKAVEWDAAWSQNLDPSGRAALGVHVSAYGEDKTEDSRPEKLQKLAEKTPAIV

SEQ ID NO: 18889 - protein, 294 aa, Saccharum officinarum
MEQYEKVEKIGEGTYGVVYKGLDKATNETIALKKIRLEQEDEGVPSTAIREISLLKEMNHDNIVRLHDVIHSEKRIYLVFEFLDLDLKKFMDSCPEFAKNPTLIKSYLYQILRGVAYCHSHRFLHRDLKPQNLLIDRRTNTLKLADFGLSRAFGIPVRTFTHEVVTLWYRAPEILLGAKQYSTPVDVWSVGCIFAEMVNQKPLFPGDSEIDELFKIFRVLGTPNEQSWPGVSCLPDFKTAFPRWQAQDLATIVPNLEPAGLDLLSKMLRYEPSKRITARQALEHEYFKDLEMVQ

SEQ ID NO: 18890 - protein, 170 aa, Prochlorococcus marinus subsp. pastoris str. CCMP1378
MLSSIDKFLKLMVVDVQNTTVVSANGEAKKLGQYSGNVILIVNVASYCGNTAQYKDLQKLHDKYSKKGLRILAFPCNDFGNQEPDSLTEIKNFCSTKYGVEFEIMEKVHAKGNTSEPYTTLNNVEPKGDVEWNFEKFLIGKDSNVIARFKPGIQPFDENLIAAIEVAIDS

SEQ ID NO: 18891 - protein, 350 aa, Escherichia coli CFT073
MRFLLGVLMLMISGSALATIDVLQFKDEAQEQQFRQLTEELRCPKCQNNSIADSNSMIATDLRQKVYELMQEGKSKKEIVDYMVARYGNFVTYDPPLTPLTVLLWVLPVVAIGIGGWVIYARSRRRVRVVLEAFPEQSVPEGKRAGYVVYLPGIVVALIVAGVSYYQTGNYQQVKIWQQATAQAPALLDRALDPKADPLNEEEMSRLALGMRTQLQKNPGDIEGWIMLGRVGMALGNASIATDAYATAYRLDPKNSDAALGYAEALTRSSDPNDNRLGGELLRQLVRTDHSNIRVLSMYAFNAFEQQRFGEAVAAWEMMLKLLPANDTRRAVIERSIAQAMQHLSPQESK

SEQ ID NO: 18892 - protein, 501 aa, Pirellula sp. 1
MVLVSCSSAFSASRNGWFDCSSIENSTQKFDSPYTNVADACENAARVGLERAGGFRLFPGNFHLGVKMSDTFNPDTPNIDAPAIDSPTTDPEPAEFEVKLASRVDRLPPYMFGRINNLLYQKRRAGDDVIDLGMGNPSDPPDPIVVQKLNDAAADIGNHGYSKSNGITNLRREVASKYHRKYGVRLDPEGEIIACLGSKEGFSHMCLALMGPGDTAIIPSPYFPVHMYGVILASGNVVALDVADPDKFLSNVAYTCENLTPRPKVLIVNYPHNPSSAVIEGDFFVEVVRLAKKYGLMVIHDFAYADVAFDGYVPPSFLSAPGAKDVGVEFTTMSKGYNMAGWRVGFCAGNADMVRGLGTIKGYYDYGMFQAIQIAAIVALRETEATVAKQSEVYQSRRDVLVSGLRRLGWNVNPPKAGMFVWAEVPEPWKSQMSTMDFAMMLLEDGNVAVSPGSGFGAAGEGYLRMSLVENEHRLRQAVRQIGKCLAAGKADAGPVASSAS

SEQ ID NO: 18893 - protein, 546 aa, Streptococcus agalactiae 2603V/R
MNKFKVNISGMTCTGCEKHVESALEKIGAKNIESSYRRGEAVFELPDDIEVESAIKAIDEANYQAGEIEEVSSLENVALINEDNYDLLIIGSGAAAFSSAIKAIEYGAKVGMIERGTVGGTCVNIGCVPSKTLLRAGEINHLSKDNPFIGLQTSAGEVDLASLITQKDKLVSELRNQKYMDLIDEYNFDLIKGEAKFVDASTVEVNGTKLSAKRFLIATGASPSLPQISGLEKMDYLTSTTLLELKKIPKRLTVIGSGYIGMELGQLFHHLGSEITLMQRSERLLKEYDPEISESVEKALIEQGINLVKGATFERVEQSGEIKRVYVTVNGSREVIESDQLLVATGRKPNTDSLNLSAAGVETGKNNEILINDFGQTSNEKIYAAGDVTLGPQFVYVAAYEGGIITDNAIGGLNKKIDLSVVPAVTFTNPTVATVGLTEEQAKEKGYDVKTSVLPLGAVPRAIVNRETTGVFKLVADAETLKVLGVHIVSENAGDVIYAASLAVKFGLTIEDLTETLAPYLTMAEGLKLVALTFDKDISKLSCCAG

SEQ ID NO: 18894 - protein, 294 aa, Thermobifida fusca
MAERFAEWSDVVGLDLVRYGTTADAEEIRDTAVAQPLLVSAGIAAAIALFGDLESAAASADVVAGHSVGEFTAAAVAGALTPRDALLLVAERGRGMAEASAVTPTGMTAVLGGDRDEVLAAIKAAGLTPANDNGSGQIVAAGTLEQLEALAAAPPARARLRPLAVAGAFHTHHMAPAVKRVEALAATLTPADPRTRLLSNRDGAVVTSGSEYLSRLVSQISSPVRWDACTATLADLGVTALMELPPAGTLTNLAKRALRGVELLAIKSPEDLDRARTLVADHAGATSTDLEGQA

SEQ ID NO: 18895 - protein, 195 aa, Oryza sativa
  unsure (1)..(195): unsure at all Xaa locations
MKNIPVLLGLLSVWNVSFLGYPARAILPYSQALEKFAPDIQQLSMESNGKGVSIDGVQLPFESGEIDFGEPGTNGQHSFYQLIHQGRVIPCDFXSVSVKSQQPVYLKGEILSNHXXXLNVPFSFAQPDXVCLWESXLTXGLAXKXPXXLSXXGXXGXXXXVXXLLXXCDLAGDRPGFRGCLGGGIGNCGRSFWGF

SEQ ID NO: 18896 - protein, 158 aa, Azotobacter vinelandii
MRDPLFGIPLDDQPRTLADFPGRAWLVVNTASRCGFTPQYEGLQMLWQRYRERGLVVLGFPCDQFGHQEPGNELEIAEFCQLRYGVDFPLFQKVEVNGPRAHPLFVELKKRAPGLLGSQRVKWNFTKFLIGREGRVVRRFAPATGPRELCGEIEALLE

SEQ ID NO: 18897 - protein, 109 aa, Glycine max
  unsure (1)..(109): unsure at all Xaa locations
EIFGGYLYFHKAPNKEEFHIETYHKIKXLHQYNYLRANKSTFTXNLEAHIPFLDKAFINTTISINPKSKIIKRNKRRIKXXILKRAFNNKEHPYLPKHILYRQKKQFSN

SEQ ID NO: 18898 - protein, 389 aa, Ralstonia metallidurans CH34
MAESNLAPLNPPPSRLPNVGTTIFTVMSALAAEKNAVNLGQGFPDFDCDPRIVDAVTHAMRTGHNQYPPMAGVPQLRQAIAAKIAKLYEHTYDWNTEITVTAGATQGLLTAILCAVHPGDEVIVLEPCYDSYLPAIELAGATAVPVTLEAPLFRIPFDKLAAAITPRTRMIMINTPHNPTGTIWREEDMQQLADLLAGTDILLLSDEVYEHMVYDGQQHESVARHPELARRSFVVSSFGKTYHVTGWKVGFVAAPAALSNEFRKVHQFNVFTVNTPVQYGLADYMADPAPYLNLSAFYQAKRDYFRAGLAGTRFKLLPSDGTYFQCVDYSAISDMSEADFSMWLTREIGVAAIPVSAFYSTPRESGVVRFCFAKKEETLKLALDRLAKL

SEQ ID NO: 18899 - protein, 166 aa, Oryza sativa (japonica cultivar-group)
MAAAAEEKNKKMIKVISSDGEAFEMTEAAASMSRILLHMIEDGCTGDGGAGITLPNVAGSALAKVIEYCTKHAIAAAEGSSSSRKAKEELKKFDVEFMEVGIDMLYDLIMAANFMGVEGLLSLAAQRTAELIKGKSPEQIREMFGIKNDHTPEEEEQIRKEYEWAF

SEQ ID NO: 18900 - protein, 245 aa, Dechloromonas aromatica RCB
MNDDKTHFGYETVAEQEKARRVADVFDSVASRYDLMNDLMSGGMHRLWKAFTIQRSGVREGSRVLDVAGGTGDLSLAFSKKVGKSGQVWLTDINNAMLARGRDRLLDKGYMLPVAQCDAEKLPFPDNWFDCVTVAFGLRNMTHKDAALAEMYRVLRPGGRLLVLEFSQIWKPLAPLYDFYSFKVIPQVGKLVTNDADSYRYLSESIRVHPGQEELKSMMEKAGMEKVEYFNLALGVVALHRGFKF

SEQ ID NO: 18901 - protein, 379 aa, Arabis procurrens
MITTGQIIRCKAAVAWEAGKPLVMEEVEVAPPQKHEVRIKILFTSLCHTDVYFWEAKGQTPLFPRIFGHEAGGIVESIGEGVTDLAPGDHVLPIFTGECGDWPHCHSEESNMCDLLRINTERGGMIHDGESRFSINGKPIHHFVGTSTFSEYTVIHSGQVAKINPDAPLDKVCIVSCGLSTGLEAPLNVANPKKGQSVAIFGLGAVGLAAVEGARIAGASRIIGVDLNSKRFDEAKKFGVTEFVNPKDHDKLVQQVIAEMTNGGVDRSVECTGSVQAMIQAFECVHDGWGVAVLVGVPSKDDAFKTHPMNFLNERTLKGTFFGNYKPKTDIPGLVEKYMNKELEIEKFITHTVPFSEINKAFDYMMKGEGIRCIITMGA

SEQ ID NO: 18902 - protein, 379 aa, Arabis procurrens
MITTGQIIRCKAAVAWEAGKPLVMEEVEVAPPQKHEVRIKILFTSLCHTDVYFWEAKGQTPLFPRIFGHEAGGVVESVGESVTDLAPGDHVLPIFTGECGDCPHCHSEESNMCDLLRINTERGVMIHDGESRFSIDGKPIYHFVGTSTFSEYTVIHSGQVAKINPDAPLDKVCIVSCGLSTGLGATLNVAKPKKGQSVAIFGLGAAGLAAAEGARIAGASRIIGVDLNSKRFDEAKKFGVTEFVNPRDHDKPVQQVIAEMTDGGVDRSVECTGSVQAMIQAFECVHDGWGVAVLVGVPSKDDAFKTDPMNFLNERTLKGTFFGNYKPKTDIPGLVEKYMNKELEIEKFITHTVPFSEINKAFDYMLKGKGIRCIITMGA

SEQ ID NO: 18903 - protein, 379 aa, Barbarea vulgaris
MITTGQIIRCKAAVAWEAGKPLVMEEVEVAPPQKHEVRIKILFTSLCHTDVYFWEAKGQTPLFPRIFGHEAGGIVESVGEGVTDLQPGDHVLPIFTGECGDCPHCHSEESNMCDLLRINTERGGMIHDGESRFSINGKPIHHFLGTSTFSEYTVVHSGQVAKINPEAPLDKVCIVSCGLSTGLGATLTVAKPKKGQSVAVFGLGAVGLGAAEGAKMAGASRIIGVDLNPKRFEEAKKFGVTEFVNPREHDKPVQQVIADMTNGGVDRSVECTGSVQAMIQAFECVHDGWGVAVLVGVPSKDDAFKTHPMNFLNERTLKGTFFGNYKPKTDIPGVVEMYMNKELELEKFITHTVPFSEINKAFDYMLKGESIRCIITMGA

SEQ ID NO: 18904 - protein, 572 aa, Staphylococcus epidermidis ATCC 12228
MVNTNNHISEELDKNLDEMEFLKANSDFLRGTIEQSLANPITGSITQDDAKLLKFHGSYMQDDRDLRDERRKQKLEPAYSFMIRVRVPGGKATPEQWIAMDDISNQYANHTIKLTTRQAFQFHGILKRNLKQSMKNINHAVLDSIAACGDVNRNTMCNPNPYQSQVHKEINDYATRISNHLLPRTNAYHEIWLDGEKVLDSSEEKEPIYGNTYLPRKFKIGIAVPPSNDIDVYSQDIGLIAIVEQDELIGFNVTIGGGMGMTHGITETYPQLGRLIGFIPKEKVVDVCEKILTIQRDYGNRENRKNARFKYTVDRLGETWVTEELNRRLGWEIKAPRDFEFEHNGDRLGWIEGINNWNFTLFIQNGRVKDTEDYLLKTALREIAEIHTGDFRLSPNQNLVIANVSPEKKEEIQAIIDKYKLTDGKNYTGLRRNSMACVAFPTCGLAMAESERYLPSLITKIEDLLDESGLKEEEITIRMTGCPNGCARPALAEIAFIGKAPGKYNMYLGGSFKGERLNKIYKENIDENEILESLRPLLLRYSKERLDGEHFGDFVIRDGVIAKVHDGRDFHS

SEQ ID NO: 18905 - protein, 502 aa, Brassica rapa
MARKMLSDGELNKAAAAGEEATTETHYDFDLFVIGAGSGGVRAARFSANNGAKVGICELPFHPISSEEIGGVGGTCVIRGCVPKKILVYGATYGGELEDARNYGWEINGNVDFNWKKLLQKKTDEILRLNNIYKRLLANAAVKLYEGEGRIVGPNEVEVRQIDGTKISYTAKHILIRTGSRAQKPNIPGHELAITSDEALSLEEFPKRAIVLGGGYIAVEFASIWRGMGATVDLFFRKELPLRAFDDEMRELVARNLEGRGINLHPQTSWHELIKTDDGIKVISSHGEEFVADVVLFATGRIPNTKRLNLEAVGVELDQAGAVKVDEYSRTNIPSIWAVGDATNRINLTPVALMEATCFANTVFGGKLRKADYTNVACAVFCIPPLAVVGLSEEEAVEKATGDILVFTSGFNPMKNTISGRQEESLMKLIVDEKTDKVIGASMCGPDAAEIMQGIAIALKCGATKAQFDSTVGIHPSSAEEFVTMRTVTRRIANKAKPQTSL

SEQ ID NO: 18906 - protein, 553 aa, Pseudomonas aeruginosa UCBPP-PA14
MTCDSCAAHVKEALEKVPGVQSAVVSYPKGTAQLAIVPGTSPDALTAAVAGLGYKATLADAPLADNRVGLLDKVRGWMAAAEKHSGNEPPVQVAVIGSGGAAMAAALKAVEQGAQVTLIERGTIGGTCVNVGCVPSKIMIRAAHIAHLRRESPFDGGIAATVPTIDRSKLLAQQQARVDELRHAKYEGILGGNPAITVVHGEARFKDDQSLTVRLNEGGERVVMFDRCLVAAGASPAVPPIPGLKESPYWTSTEALASDTIPERLAVIGSSVVALELAQAFARLGSKVTVLARNTLFFREDPAIGEAVTAAFRAEGIEVLEHTQASQVAHMDGEFVLTTTHGELRADKLLVATGRTPNTRSLALDAAGVTVNAQGAIVIDQGMRTSNPNIYAAGDCTDQPQFVYVAAAAGTRAAINMTGGDAALDLTAMPAVVFTDPQVATVGYSEAEAHHDGIETDSRTLTLDNVPRALANFDTRGFIKLVIEEGSHRLIGVQAVAPEAGELIQTAALAIRNRMTVQELADQLFPYLTMVEGLKLAAQTFNKDVKQLSCCAG

SEQ ID NO: 18907 - protein, 416 aa, Escherichia coli
MESKVVVPAQGKKITLQNGKLNVPENPIIPYIEGDGIGVDVTPAMLKVVDAAVEKAYKGERKISWMEIYTGEKSTQVYGQDVWLPAETLDLIREYRVAIKGPLTTPVGGGIRSLNVALRQELDLYICLRPVRYYQGTPSPVKHPELTDMVIFRENSEDIYAGIEWKADSADAEKVIKFLREEMGVKKIRFPEHCGIGIKPMSEEGTKRLVRAAIEYAIANDRDSVTLVHKGNIMKFTEGAFKDWGYQLAREEFGGELIDGGPWLKVKNPNTGKEIVIKDVIADAFLQQILLRPAEYDVIACMNLNGDYISDALAAQVGGIGIAPGANIGDEYALFEATHGTAPDIAGQDKANPGSIILSAEMMLRHMGWTEAADLIVKGMEGAINAKTVTKDFESLMDGAKLLKCSEFGDAIIENM

SEQ ID NO: 18908 - protein, 413 aa, Oryza sativa (japonica cultivar-group)
MGSPRGRRRGDNGRLLLLAAAAVVIASLVGGGAAQPTTSGPGPNYFNPKSFNPSMAVVIVVLVTAFFFLGFFSIYIRRCAGGPLGGPGGYGVGGGGGGRVGGGFTFAAARSRRVRGLDPAVLGAFPTMAYADVKAHKAGKGALECAVCLSEFDDDETLRLLPRCSHAFHADCIDAWLASHVTCPVCRANLAFDAGVPPPPLAPPHALTTGQDVAAAPPQPAAPEQVTVDVVVADAEETEERIRREEAAELMRIGSVKRALRSKSGRRPPQFPRSHTTGHSLAAAAAVPATADDAAERYTLRLPDHVLREIVTSARLRRTTSLQSFRTTAAAGGGARAGRSVRLGQSGRWSNVSSLMRTFSARLPAWGSARRGAEADSPGKDGAKVAGDCTASVEQHCDGGGGGACPRPLGDHV

SEQ ID NO: 18909 - protein, 96 aa, Glycine max
  unsure (1)..(96): unsure at all Xaa locations
DSSMISYPADTTDNPAXAEMTAPFTDLNALHVLPTIKTNNELTSIASNPGKLLCMQVCTPLVNKKFETLSYLPDLDDATFEDEPEYLLMNGWIPCL

SEQ ID NO: 18910 - protein, 365 aa, Thermobifida fusca
MPAELTFVAPRRTPPPRHLADLDPQERRDAVAELGEKPFRARQLAQHYFGRLEADTARMTDLPAASRERLGEALLPQLLTPVKHVTCDNGMTRKTLWRAFDGVLVESVLMRYPDRVTLCVSSQAGCGMNCPFCATGQAGLTRNLSTAEIVDQVVSSARDLARGTVAGGPGRISNIVFMGMGEPLANYKRVLAAIRRITDPVPDGLGISQRGITVSTVGLVPAIEKLTAERMQVRLAVSLHAPDDELRDELVPVNHRWKVAEVLDAAWRYADTTGRRVSIEYALIRDINDQAWRADLLGRLVAGRLAHVNLIPLNPTPGSKWTASRPEVEREFVRRLRSHGVSVTVRDTRGREIDGACGQLAASGA

SEQ ID NO: 18911 - protein, 316 aa, Streptomyces avermitilis MA-4680
MLVLVAPGQGAQTPGFLTPWLELPGAADRVAAWSDAIGLDLAHYGTQADADAIRDTSVAQPLLVAAGILSASALGDVAPGAVAGHSVGEITAATFAGVIDDTAALTLVRTRGLAMAEAASLTPTGMAALLGGDPETTIPHLEKLGLTPANVNGAGQIVAAGTLEQLAALEAEKPEGVRKVIALKVAGAFHTPHMAPAVDALARAAEALTPADPVVSYVSNKDGQEVATGAEILSRLVGQVANPVRWDLCMETFKKLGVTTLVEVCPGGTLTGLAKRAMPGVKTLALKTPDDLDAARELIAEAVTSAAVPAGVREGA

SEQ ID NO: 18912 - protein, 95 aa, Zea mays
  unsure (1)..(95): unsure at all Xaa locations
GVTKYIQALLFAGFLMQKELDYLVGAVANPKKPFAAIVGGSKVXRKIGVIESLLAKDDILILGGGMIYTFYKXQGILVEKSLGEKDNLELGTFLI

SEQ ID NO: 18913 - protein, 429 aa, Thermobifida fusca
MSDLLARHRAVMPAWMPLYYETPIEIVSGKGNRVVDADGNTYLDFFAGIVTNMIGYDVAEVREAVEAQLARGVVHTSTLYLLRGQVELAEKIARLSGIPDAKVFFTNSGTEANETALLLATYARRSDEVLALRNSYHGRSYGTIAVTGNRGWKNSSLSPLTVHYLHGTDRSHPAFAHLSDREYIDVCVADLRDVLSTTAPNVACLIAEPIQGVGGFVMPPDGLFAAYKEVLDEQGILFISDEVQTGWGRTGTSFWGIGNHGVTPDMMTFAKGLGNGFAIGGVVARGDLMDALPANGVSTFGGNPISTAAANATLDYVLDHDLQANAARLGPLVLERLQPLEQLPTVSAVRGRGLMFAIDMADPATGAPSAELAVAVLEETRKRGLLIGKGGLHGQTLRMAPPLTLTEEEAEEGAAILVDAVTAVNDAVA

SEQ ID NO: 18914 - protein, 460 aa, Ralstonia metallidurans CH34
MPRRKRSVRPTTREADFVVIGAGSGGVAAARRAASHGARVILVERDAIGGTCVNRGCVPKKMLSYGANWASILSTCLSHTGGKEDWRDASVRVNAEVARLNASYAQRLNEAGVEILHGDARLSGADEVVVGNEIIRTRKTLIATGAHPLALPVPGGELASSSDDVFTWQTVPASIAVIGGGYIAVEMASILSRYGVKVDLLVRGDRLLPKFDHDIAAALAEALAAKGVRLHFRADVTMLSQANGATEVCYTQQNNPGRTQTVRAQAVLAAIGRRPSIAELGLDALGVQLGERGGICVDRQFRTTVRSIHAIGDCMDRNLHLTPVAIAQGRWLADRLFGKRGDIADFDFVPTAVFSEPAIGAVGLTEAQAIEAAGGRADRVRTEIKRFVSLENRFGGVAQPSVFKLVFNARSGRVLGAHLMDNAAPEIIQTFAVALRLGVKDAHLKTTMPLHPTVAEELFG

SEQ ID NO: 18915 - protein, 214 aa, Shigella flexneri 2a str. 2457T
MSQTSTLKGQCIAEFLGTGLLIFFGVGCVAALKVAGASFGQWEISVIWGLGVAMAIYLTAGVSGAHLNPAVTIALWLFACFDKRKVIPFIVSQVAGAFCAAALVYGLYYNLFFDFEQTHHIVRGSVESVDLAGTFSTYPNPHINFVQAFAVEMVITAILMGLILALTDDGNGVPRGPLAPLLIGLLIAVIGASMGPLTGFAMNPARDFGPKVFA

SEQ ID NO: 18916 - protein, 448 aa, Thermobifida fusca
MASEHADLPQERRLVTEIPGPRSRALQERRTAAVAQGVGSSLPVYVVRASGGIVEDVDGNRLIDFGSGIAVTNVGNANPRVVARASEQLARFTHTCFMINPYEGYVDVCEALNRITPGDHEKRSILVNSGAEAVENAVKIARHATGRQAVVVFDHAYHGRTNLTMALTARNMPYKQGFGPFAGEVYRMPMAYPFRWPTGPDNCGPEAAAQAIDLITTQIGPENVAAVLIEPIQGEGGFIVPGEGFLPALVEFCRKHGIVFIADEIQTGFARTGRLFACEHEGIVPDLITTAKGIAGGLPLAAVTGRAELMDAVHGGGLGGTYGGNPVACAAALAALETIEQDNLVERARAIGDVLLSRLRALAERYDIIGDVRGRGAMVAMELVAGAGDKTPNPEALASVVKYCHAKGLILLTAGTYGNVIRLLPPLVISDALLDEGLTIIEEAFAQL

SEQ ID NO: 18917 - protein, 220 aa, Zea mays
MCGILAVLGCSDCSQARRARILACSRRQAPVHCTGTELFSYRNHKESNGRETRMGRSEKEHGNLTRSSNPVLKHRGPDWSGLYQHEGNFLAQQRLAIVSPLSGDQPLFNEDRTVVVVANGEIYNHKNVRKQFTGAHSFSTGSDCEVIIPLYEKYGENFVDMLDGVFAFVLYDTRDRTYVAARDAIGVNPLYIGWGSDGQTQTQRGVAFSQCGRAKQSTPA

SEQ ID NO: 18918 - protein, 127 aa, Oryza sativa
MVSWRVAAAGGLLLILLVAQQASAQAAEKVISVSAVVQPNTKKKPPHQQPKIRKCTEAQKQDILHECRGYVTAGSHIILPDLHSACCDAARSVQNLDMDCIVDLLTSEERSRYNANRIKHLNEMCRP

SEQ ID NO: 18919 - protein, 319 aa, Lactobacillus johnsonii NCC 533
MKRIGILTSGGDAPGMNAAIRAVTRTALANGIEVCGIRYGYAGLVAGDIFQMTSETVADKISRGGTFLYSARFPEFKEEEVQLKGIEQLKKHGIDALVVIGGDGSYHGALKLTRHGYNAIGLPGSIDNDIPYTDYTIGFDTACNTAMEAIDKIRDTATSHQRVFVVNVMGRDCGDIAMHVGVATGADAIVIPEEPYDIKEIAENLKQGFANGKKHGIVVLAEGVMDAEKFKDELLKYGDFDARANVLGHMQRGGSPTMRDRVVASEMGAYAVKLLLEGKGGLAVGMENNKLTHHDILDLFDAKHHGNYALYSLNKDLAK

SEQ ID NO: 18920 - protein, 460 aa, Anabaena variabilis ATCC 29413
MVNTNPTLEQILPGGSDPHSFDWHEAWYPVHYLEDLDKSKPTAFTLLGKDIVIWWDQQSQTWQAFEDQCPHRLAPLSEGRINEEGLLECPYHGWSFAGDGSCQRIPQQPEGGQAETSQRACVTSWLTTERQGMLFVYIGNPENAAKTKIPVVEPLEESPDGWVIINTFRDVPYDALTLLENILDPSHLAYTHHKTVGNRKNAAPLELEVVVSGKHGFKGVWHQSIKAGQSELSTTFVAPALMWHDINSERGRILTVVYATPIRKGECRLFARFPFKFPSKLPGIFIKLRPRWYYHLGQNGVLEDDQIFLHYQERYLQAKGGSPNFTKAFYLPTKADSFVFELRQWVNNYNAEPFPGQAFSQAIPKEQLLERYYSHTIKCASCRNALAKIQKLRLWSGVITVISLVSTPLITLFFDASSIPAILIETVTPITFAVIWRGLSKLEKQFYEGRIIPPRNLPNS

SEQ ID NO: 18921 - protein, 828 aa, Escherichia coli CFT073
MKLSRRSFMKANAVAAAAAAAGLSVPGVARAVVGQQEAIKWDKAPCRFCGTGCGVLVGTQQGRVVACQGDPDAPVNRGLNCIKGYFLPKIMYGKDRLTQPLLRMKNGKYDKEGEFTPITWDQAFDVMEEKFKTALKEKGPESIGMFGSGQWTIWEGYAASKLFKAGFRSNNIDPNARHCMASAVVGFMRTFGMDEPMGCYDDIEQADAFVLWGANMAEMHPILWSRITNRRLSNQNVTVAVLSTYQHRSFELADNGIIFTPQSDLVILNYIANYIIQNNAINQDFFSKHVNLRKGATDIGYGLRPTHPLEKAAKNPGSDASEPMSFEDYKAFVAEYTLEKTAEMTGVPKDQLEQLAQLYADPNKKVISYWTMGFNQHTRGVWANNLVYNLHLLTGKISQPGCGPFSLTGQPSACGTAREVGTFAHRLPADMVVTNEKHRDICEKKWNIPSGTIPAKIGLHAVAQDRALKDGKLNVYWTMCTNNMQAGPNINEERMPGWRDPRNFIIVSDPYPTVSALAADLILPTAMWVEKEGAYGNAERRTQFWRQQVQAPGEAKSDLWQLVQFSRRFKTEEVWPEELLAKKPELRGKTLYEVLYATPEVSKFPVSELAEDQLNDESRELGFYLQKGLFEEYAWFGRGHGHDLAPFDDYHKARGLRWPVVNGKETQWRYSEGNDPYVKAGEGYKFYGKPDGKAVIFALPFEPAAEAPDEEYDLWLSTGRVLEHWHTGSMTRRVPELHRAFPEAVLFIHPLDAKARDLRRGDKVKVVSRRGEVISIVETRGRNRPPQGLVYMPFFDAAQLVNKLTLDATDPLSKETDFKKCAVKLEKV

SEQ ID NO: 18922 - protein, 340 aa, Nostoc punctiforme PCC 73102
MQFADFWYIVALSNQLQPNKVLPRTVLGEWLAIFRGEDGQPVALRDRCLHRNSRLSSGKICNGALQCPYHGWVYDGVGNVIAVPAEGNDFKPSPQRRAKCYATKEQDGYVYVRLADTPSVDFEPFSMPHYGQTGWETVRVINRFANNVTNCAENFIDIPHTAFVHPGVFRTSRQQKLEMTVERWNGSVLVEYRNENSNLGWYSRFLNLQSAEIKHSDRFYMPNITSVEYKMARNRHLFITSQSIPETDNSTLVYTDVTYNYGIWNKLARPFVRWTAQHIIRQDVEILGIQGEAIAKYGTQFYNTPADTIHIFVESIMAAISRGEDPRLLPNQSVKVTFWV

SEQ ID NO: 18923 - protein, 541 aa, Oryza sativa
  unsure (1)..(541): unsure at all Xaa locations
MTTVASLSLLPHLLIKPSFRCCSRKGVGRYGGIKVYAVLGDDGADYAKNNAWEALFHVDDPGPRVPIAKGKFLDVNQALEVVRFDIQYCDWRARQDLLTIMVLHNKVVEVLNPLAREFKSIGTLRKELAELQEELAKAHNQVHLSETRVSSALDKLAQMETLVNDRLLQDGGSSASTAECTSLAPSTSSASRVVNKKPPRRSLNVSGPVQPYNPSLKNFWYPVAFSSDLKDDTMVPIDCFEEQWVIFRGKDGRPGCVMNTCAHRACPLHLGSVNEGRIQCPYHGWEYSTDGKCEKMPSTKMLNVRIRSLPCFEQEGMVWIWPGNDPPKSTIPSLLPPSGFTIHAEIVMELPVEHGLLLDNLLDLAHAPFTHTSTFAKGWSVPSLVKFLTPSSGLQGYWDPYPIDMEFRPPCMVLSTIGISKPGKLEGKSTKQCSTHLHQLHICLPSSRNKTRLLYRMSLDFAPWIKHVPFMHILWSHFAEKVLNEDLRLVLGQQERXDQWRKCLELASIIXKLGIRYRLWRDAIERGVDRLPFSNQSESGS

SEQ ID NO: 18924 - protein, 196 aa, Oryza sativa
  unsure (1)..(196): unsure at all Xaa locations
MSRRQEICRNFQRGSCKYGAQCRYLHASPHQQQQQQQQQQAKPNPFGFGTGSRQQQQPSFGSQFQQQQQQQQKPNPFGFGVQGANAQSRNAPGPAKPFQNKWVRDPSAPTKQAEAVQPPQAQAAHTSCEDPQSCRQQISEDFKNEAPIWKLTCYAHLRNGPCNIKGDIIFEELRAXAYEEGKQGHSLQSIVEGERN

SEQ ID NO: 18925 - protein, 876 aa, Pinus sylvestris
DDHGEVISEMRRYDLEPYLGLHYPATDIPQASRFLFMRNRVRMICDCYAQPVAVIQDERLPRDLSFCGSTLRAPHGCHAQYMANMGSIASLVMAVVINEKELDGDSEGQMQQKGRRLWGLVVCHHTSPRYVPFPLRYACEFLMQVFGIQLNKEVELAAQIREKQILRTQTLLCDMLLRDTPLGIVTQKPNIMDLVRCDGAALYYERNFWLLGVTPTEAQIQDIVAWLSEHHMDSTGLSTDSLVYAGYPGAESLGNAVCGIAAVRINSKDFLFWFRSHTAKEIKWGGAKHDLQERDDGKKMHPRSSFNAFLEVVKMRSLSWEDVEMDAIHSLQLILRGSRKETDGSGRNISINRQLNDLKLQEMDELNAVTNEMVRLIETATAPILAVDAYGVVNGWNRKAAELTGLSVEEVLGEPLINLVEETSAENVKRMLHLALQGVEEQNVQIELKRHGSEEDKGPVVLLVNACSSRDLKENVVGVCFVAQDVTGQKIVMDKFTRIQGDYRAIVQNPSPLIPPIFGTDECGCVPENSAMEKLSGWKREEIIDKMLLGEVFGTRTACCRLKGQNALTQLRIILNSSMTGQETEKFPFGFFDRHGKYVETLLSANKKLDEEGKITGVFCFLHIASPELQQALYVQHMLEQAAMKRLQALTYLRLEIKNPLYGIMFTQKMMERTDFLREDQRQLVETSALCQKQILKILDDMDLESIEDRYLDLDTVEFTLGALLDAVISQGMIQSEEKGLEIGYDLPREITTTGLYGDQSRLQQILANFLVTVIQFTPAEKWVRIKVSPTKRHLGGGVYVIGIEFRITHPGPGLPEKLVQQMFNFDPDMSQEGFGLLICRKLVRLMNGDVQYLRGGGTSSFVIVVELATSQNEEC

SEQ ID NO: 18926 - protein, 373 aa, Arabidopsis thaliana
MHIHMMNRDEHIAKKVEGSISSFSGETSTSSKQIYVNPVTTTGTKSMEDDDVSLSLLYNLSTLHEKVHQIQSLVSFYMVSTNNINQSSGSTSLAVANIGSLVQEIITAASSMLYTCQQLQIGSNNNNNDIDNDQTVDAMVLEFSRQETDPGHDFVQESTNLFGVQERGQISFPDQNLDWYNTETINPKKDKHRSKPSSGSYDILELDVADLLAKYTHYCQICGKGFKRDANLRMHMRAHGDEYKTREALISPTSQDKKGGYSLKKHYYSCPQHGCRWNQRHEKFQPLKSVICAKNHYKRSHCPKMYMCRRCSVKHFSVLSDLRTHEKHCGDIKWVCSCGTKFSRKDKLMSHVSLFLGHVPAHGSSKPPTITLK

SEQ ID NO: 18927 - protein, 217 aa, Vibrio cholerae
EVLIANGIEVIVQENNGYTPTPGISHAILTYNLKHADKADGIVITPSHNPPQDGGIKYNPPHGGPAEGELTQAIEDRANAYISQQLAGVKRMPIALAKQSELLKQVDLVKPYVDDLVNVVDMAAIQKAKLKIGVDPLGGSGIDYWRQIGNAYQLDLTLVSEAIDPSFQFMSLDKDGVIRMDCSSPYAMAGLLALKDEYDLAFGNDPDYDRHGIVTPK

SEQ ID NO: 18928 - protein, 158 aa, Brucella melitensis 16M
MKKNNLFRALLISATFALQATAAFAVNPDEVLSDPKLEKRAREISAELRCMVCQNESIDDSNAELARDLRILVRERLTKGDTDGQVIDFVVDRYGEFVLLKPRFNAQTALLWGFPVIILLIGGGALLVAFRRRRAAGTAPQPLSESEKAELSRLLDGK

SEQ ID NO: 18929 - protein, 304 aa, Streptococcus uberis
MTKVRKAIIPAAGLGTRFLPATKALAKEMLPIVDKPTIQFIVEEALRSGIEEILVVTGKSKRSIEDHFDSNFELEYNLQEKGKTELLKLVDETTSINLHFIRQSHPKGLGDAVLQAKAFVGNEPFIVMLGDDLMDITNTKAVPLTKQLMDDYETTHASTIAVMKVPHDDVSSYGVIAPNGKALNGLYSVDTFVEKPKPEDAPSDLAIIGRYLLTPEIFDILENQAPGAGNEVQLTDAIDTLNKTQRVFAREFTGKRYDVGDKFGFMKTSIDYALKHHQVKDDLKAYIIKLGKELEKAQDSKESK

SEQ ID NO: 18930 - protein, 355 aa, Streptomyces griseus subsp. griseus
MKALVLAGGMGTRLRPLTHSMPKQLVPLANKPVLCHALEDIARAGVTDVGIIVGDWHKEIEEAVGDGGRFGLRITYLPQEAPFGLAHCVLVAREFLADDDFLMYLGDNVFADGVHALADAFRRDRPAAQVAVTAVDSPQEYGVAVTTSDGRVLGLQEKPREPRSDLAVTGAYFFTPEIHDAIARIRPSTRGEWEITDAIQALIDRGSEVRAVRLSDWWKDTGRVEDILDCNQLLLDHVTTSVRGSVDAASTVLGPVVVEPGARIIRSHLRGPLIVGAGCVVEDSYVGPYSAVGANCALTDAGISHSIMLQDATVTDVNGIHRSVIGRSARVGAPVNGTGRHRLVVGDHTELEVVA

SEQ ID NO: 18931 - protein, 413 aa, Rhodobacter sphaeroides
MAKEPMLQFVKMARETPEKRPRSKRSQDFGEICGRICPQDRKCEGNCVIEQSGHGTVTIGAVEKYITDTAWENGWVVPGKPAYERSESVGIIGAGPGGLAAADALRRAGLQVTVYDRYDRAGGLLTYGIPGFKLEKDVVARRVEQLEQAGVQFVLNCNVGEDLSFDAIRGQHDAVLIATGVYKQRDLAAPGVGSAGVVQALSYLTASNRRSFGDEVDDDGLDASGKRVVVIGGGDTAMDCVRTAIRQGATSVKCLYRRDRANMPGSQREVANAEEEGVEFVWLSAPRGFIAGDAVEGVIVQKMRLGEPDATGRQMPEIIEGADYVEPADLAIMALGFEPEDLPTLWGVPDLTVTRWGTIKADFRTHATSLPGVYAVGDIVRGASLVVWAIRDGRDAAQSILDYLAQPAVVAAE

SEQ ID NO: 18932 - protein, 195 aa, Rhodospirillum rubrum
MEQASKGSGGGDWLIRGVFSLGLALASFGGPASAQAAGAHDYSFPAIDGGTLPLAAWAGHPVLVVNTASECGFTAQYEGLEALWKAYRAKGLIVLGVPSNDFGGQEPGSAAEIKDFCESTFAVDFPLTDKTAVSGARAHPFYAWAKASRPDLSAPRWNFHKYLIAPDGSLAASFSALTDPKDRDLTDAIDKLLEK

SEQ ID NO: 18933 - protein, 557 aa, Schizosaccharomyces pombe
MCGILAVHHVAEDIEAFKPKALHLSKQLRHRGPDWSGKAIRNQTILCHERLAIVGVESGAQPLVSDDGKLVLTVNGEIYNHLKLRENLKGNYKFKTYSDCEVILYLYREHGPACANMLDGMFSWVLYDQDKDKVVAARDPIGITTLYQGFSSDSPDTAYFASELKALHPVCDKIIAFPPGHYYDSETKQTVRYFKPSWWDENKIPSNPVDYKLLRETLEASVRKRLMAEVPYGVLLSGGLDSSLIASIAARETEKLANSTSQSEEARTITAWPKLHSFAIGLPGSPDLLAARKVADFLHTFHHEHTFTIDEGLDALRDVIYHLETYDVTTIRASTPMYLLSRKIKAQGVKMVLSGEGSDEIFGGYLYFGNAPSREAFHSECVRRVKNLHLSDCLRANKSTMAWGLEARVPFLDKDFLEVALNIDPEEKMYINGRKEKYILRKAFDTTHDSSLQPYLPQDILWRQKEQFSDGVGYSWIDALKDTAELCISDDEFALPRREWGDDIPTTKEAFWYRKLFDEIFPRQCADTVMRWVPKAEWGCPEDPSGRYQAGHVAALK

SEQ ID NO: 18934 - protein, 314 aa, Shigella flexneri 2a str. 2457T
MLTSGGDAPGMNAAIRGVVRSALTEGLEVMGIYDGYLGLYEDRMVQLDRYSVSDMINRGGTFLGSARFPEFRDENIRAVAIENLKKRGIDALVVIGGDGSYMGAMRLTEMGFPCIGLPGTIDNDIKGTDYTIGFFTALSTVVEAIDRLRDTSSSHQRISVVEVMGRYCGDLTLAAAIAGGCEFVVVPEVEFSREDLVNEIKAGIAKGKKHAIVAITEHMCDVDELAHFIEKETGRETRATVLGHIQRGGSPVPYDRILASRMGAYAIDLLLAGYGGRCVGIQNEQLVHHDIIDAIENMKRPFKGDWLDCAKKLY

SEQ ID NO: 18935 - protein, 879 aa, Methylococcus capsulatus str. Bath
MSPQFRQTVHTTCPYCGVGCGVLATVTDAGVKIQGDPDHPSNFGRLCSKGSALGETLSLGTRLLHPEIGGIRTGWDEALDTVAGRFRETLERYGPDSVAFYVSGQLLTEDYYVANKLMKGFIGSANIDTNSRLCMSSTVAGHKRAFGEDLVPGCYEDLELADLVVLVGSNTAWCHPVLFQRILAARRADPKRRIVCIDPRRTATAEAADLHLPIRPGTDVLLFNGLLHYLRHNDCLDFEFIERHTEGYAAALNMAKETAPTVPSVAAGCGLAESEVAQFYRLFAANERTVTLWSQGVNQSTQGTDKVNAILNVHLATGRIGKPGAGPFSLTGQPNAMGGREVGGLANQLAAHLDLDDPGHRRQVQEFWRSPRIADRPGYLAVDLFRAIGEGRIRAVWIMATNPAVSLPDVHAVRRALSACPFVVVSDCERDTDLSRFAHVQLPALAWGEKDGTVTNSERRISRQRAFLDAPGEARPDWWIIAEVARRMGFGAAFDYRSAADIFAEHIALSRIAGAEKRRFDLSGLQTAYDELAPTQWPVDAGNPQGTPRLSFDGRLTFVAVRPQAPAHAPDTGYPLILNTGRIRDQWHTMTRTGKTQRLTGHLPEPFAEVHPIDGSRLELTDGALARLESRYGSALVRVRFSAGQQPGTVFTPMHWSESNSRQGLVNALVNPAVDPVSGEPEFKHTPVRVVPYRPRWYGFAIARRRIEFPDAAYRVVIPARHCWRHELAGEVLSEDWQRWARERLGPEGDGWDDWLEFADPRAGRYRCAWIVQGRIEFALFVSPSHELPPRDWLVSLFGQDALSETARAGLLAGRPLSADDDRGRIVCACFAVGENTLRRTIASETLTTAEQVGTSLKAGTNCGSCLPEIHALLAEAQH

SEQ ID NO: 18936 - protein, 488 aa, Rubrobacter xylanophilus DSM 9941
MTTAAERVRVAGVEVSPDHFIGGERVASPRRFEDISPITNEPIAEVSRAGEAEVDAAVRAARDAFPGWAALGPAGRAPYLHRLADLIDANVERLAAVECMDMAMLLRSLRARVIRRGARNYRAYADLAASYEERDWRSQGTWNRVQRMPAGPAAIITPWNAPFMLSTWKTAPALAAGCTVVLKPAEWSPLSCSLLADLVAEAGFPPGVFNVVQGIGEEAGAALVAHPLLRRVSFTGSPETGRSIGVAAAKNLVPFTAELGGKGPLIVFEDADLDAAARRAAGQYDDAGQVCLAGTRLLVQESVAEEFLELFHRYADEHVLGDPRSEHTTVSPLIHPDHLRRVEGFVERARREGHRVLRGGRRSPAGPLFYQPTLIEPLSNDAEIVQREVFGPVLTLQTFADEEEAVSLANSTEYGLSGIVYTSSMGRADRVGRAVRAGVVWVNTFLVRDLTAPFGGMGISGIGREGGDYALDFYSDLKTLQILEGSTR

SEQ ID NO: 18937 - protein, 378 aa, Haemophilus influenzae R2846
MEIKQINSTIKSRAAVAFAPNQPLQIVEIDVEMPRKGEVLIRNTHTGVCHTDAFTLSGSDPEGVFPVVLGHEGAGVVVAVGEGVLSVKPGNHVIPLYTAECGECEFCLSGKTNLCVSVRDTQGKGLMPDGTTRFSCQGKPIYHYMGCSTFSEYSVVAEVSLAKINPEANHEQVCLLGCGVTTGIGAVHNTAKVQEGDSVAVFGLGAIGLAVVQGARQAKAGRIIAIDTNPAKFELAKQFGATDCLNPNDYDKLIKDVLLDINKWGIDHTFECIGNVNVMRQALESAHRGWGQSIIIGVAGAGQEISTRPFQLVTGRVWKGSAFGGVKGRSELPQMVEDSMKGDIQLEPFVTHTMPLDQINEAFELMHEGKSIRTVIHY

SEQ ID NO: 18938 - protein, 278 aa, Bacillus subtilis subsp. subtilis str. 168
MKKIGFVGAGSMAEAMINGILQSGITKPEHIYITNRSNDERLIELKETYSVRPCRDKNEFFTHTDIIILAFKPKDAAESIDSIRPYIKDQLVISVLAGLTIETIQHYFGRKLAVIRVMPNTSAAIRKSATGFSVSTEASKNDIIAAKALLETIGDATLVEERHLDAVTAIAGSGPAYVYRYIEAMEKAAQKVGLDKETAKALILQTMAGATDMLLQSGKQPEKLRKEITSPGGTTEAGLRALQDSRFEEAIIHCIEETAKRSAEIKEQFAGAALERHS

SEQ ID NO: 18939 - protein, 476 aa, Photorhabdus luminescens subsp. laumondii TTO1
MMSTEIKAQVVVLGAGPAGYSAAFRCADLGLETVLVERYSTLGGVCLNVGCIPSKALLHVAKVIEEAKALADHGIVFGEPKTDIEKVRVWKEKVINQLTGGLAGMAKGRKVKVVNGFGKFTGANTLVVEGEGGATTINFDNAIIAAGSRPIQLPFIPHDDPRVWDSTDALALTTVPGRLLVMGGGIIGLEMGTVYHALGSQIDVVEMLDQVIPAADKDVVKVFTKRISKQFNLMLETKVTVVEAKEDGIYVTMEGKNAPAEPQRYDAVLVAIGRVPNGKMLDAGKAGVDVDDRGFIHVDKQMRTNVPHIFAIGDIVGQPMLAHKGVHEGHVAAEVISGKKHYFDPKVIPSIAYTEPEVAWVGLTEKEAKEKGISYETATFPWAASGRAIASDCADGMTKLIFDKESNRIIGGAIVGTNGGELLGEIGLAIEMGCDAEDIALTIHAHPTLHESVGLAAEVFEGSITDLPNAKAKKKK

SEQ ID NO: 18940 - protein, 818 aa, Saccharomyces cerevisiae
MTSVFTDDISTIDDNSILFSEPPQKQSMMMSICVGVFVAVGGFLFGYDTGLINSITSMNYVKSHVAPNHDSFTAQQMSILVSFLSLGTFFGALTAPFISDSYGRKPTIIFSTIFIFSIGNSLQVGAGGITLLIVGRVISGIGIGAISAVVPLYQAEATHKSLRGAIISTYQWAITWGLLVSSAVSQGTHARNDASSYRIPIGLQYVWSSFLAIGMFFLPESPRYYVLKDKLDEAAKSLSFLRGVPVHDSGLLEELVEIKATYDYEASFGSSNFIDCFISSKSRPKQTLRMFTGIALQAFQQFSGINFIFYYGVNFFNKTGVSNSYLVSFITYAVNVVFNVPGLFFVEFFGRRKVLVVGGVIMTIANFIVAIVGCSLKTVAAAKVMIAFICLFIAAFSATWGGVVWVISAELYPLGVRSKCTAICAAANWLVNFICALITPYIVDTGSHTSSLGAKIFFIWGSLNAMGVIVVYLTVYETKGLTLEEIDELYIKSSTGVVSPKFNKDIRERALKFQYDPLQRLEDGKNTFVAKRNNFDDETPRNDFRNTISGEIDHSPNQKEVHSIPERVDIPTSTEILESPNKSSGMTVPVSPSLQDVPIPQTTEPAEIRTKYVDLGNGLGLNTYNRGPPSLSSDSSEDYTEDEIGGPSSQGDQSNRSTMNDINDYMARLIHSTSTASNTTDKFSGNQSTLRYHTASSHSDTTEEDSNLMDLGNGLALNAYNRGPPSILMNSSDEEANGGETSDNLNTAQDLAGMKERMAQFAQSYIDKRGGLEPETQSNILSTSLSVMADTNEHNNEILHSSEENATNQPVNENNDLK

SEQ ID NO: 18941 - protein, 321 aa, Haemophilus somnus 2336
MIKKIAVLTSGGDAPGMNAAIRGVVRSALSEGLEVYGIYEGYYGLYHNKIQQLTRYSVSDIINRGGTFLGSARFPEFKDPAVREKCVEILRSHGIDALVVIGGDGSYMGAKLLTEEHDFPCVGIPGTIDNDVAGTDYTIGYQTALETAVEAIDRLRDTSSSHKRISIVEIMGRHCSDLTISAAIAGGCEYIVASEIEFNREELIKQIERAIIKGKRHAIIAITELLCDVNELAREIEARVKHETRATILGHIQRGGTPCAFDRILGSRMGVYAVDLLLQGKGGYCVGIQNEQLVHHDIIDAINNMRREFKADWLAMSKRLD

SEQ ID NO: 18942 - protein, 256 aa, Zea mays
MVSSDTIRTAIGVIGNGTALVLFLSPVPTFIRIWKKGSVEQYSPIPYVATLLNCMMWVLYGLPLVHPHSMLVITINGTGMLIQLTYVALFLVYSAGAARRKVSLLLAAEVAFVGAVAALVLALAHTHERRSMVVGILCVLFGTGMYAAPLSVMKMVIQTKSVEYMPLFLSLASLVNGICWTAYALIRFDLYITIPNGLGVLFALAQLLLYAIYYKNTQKIVEARKRKAGQVAMTEVVVDGSRASNNNNNNGGSGTY

SEQ ID NO: 18943 - protein, 1247 aa, Mycobacterium avium subsp. paratuberculosis str. k10
MSNISSPFGQNEWLVEEMYRKFRDDPSSVDPSWHEFLVDYNPEPTGDSVLAAPASTDGPSAPAPAAPQTAQPALPAQTAPPAQTAQPARPAPQPAAAPGNGASTRPAKPATPPPAEGDELQTLRGAAAAVVKNMSASLEVPTATSVRAIPAKLLIDNRIVINNQLKRTRGGKISFTHLLGYALVQAIKKFPNMNRHYAEIDGKPTAITPAHTNLGLAIDLQGKDGKRSLVVAGIKNCETMRFAQFVTAYEDIVRRARDGKLTAEDFAGVTISLTNPGTIGTVHSVPRLMNGQGAIIGVGAMEYPAEFQGASEERIAELGIGKLITLTSTYDHRIIQGAESGDFLRTIHEMLLSDGFWDDIFRELSIPYLPIRWSTDNPDSIVDKNARVMELIAAYRNRGHLMADIDPLRLDGSRFRSHPDLEILNHGLTLWDLDRVFKVNGFAGAEYKKLRDILGLLRDAYCRHIGVEYTHILDPEQQEWLQQRVETKHVKPTVAEQKFILSKLNAAEAFETFLQTKYVGQKRFSLEGAESVIPMMDAAIDQCAEHGLDEVVIGMPHRGRLNVLANIVGKPYSQIFSEFEGNLNPAQAHGSGDVKYHLGATGVYLQMFGDNDIQVSLTANPSHLEAVDPVLEGLVRAKQDLLDHGADDQGDEKAFSVVPMMLHGDAAFAGQGVVAETLNLTHLPGYRVGGTIHIIVNNQIGFTTAPEHSRSSEYCTDVAKMIGAPIFHVNGDDPEACAWVAKLAVDFRQKFKKDVVIDMLCYRKRGHNEGDDPSMTNPAMYDVVDIKRGVRKSYTEALIGRGDISMKEAEDALRDYQGQLERVFNEVRELEKHGVGPSESVEADQMLPAGLATAVDKALLARIGDAFLALPEGFTAHPRVQPVLEKRREMAYEGKIDWAFAELLALGSLVAGGKLVRLSGQDTRRGTFSQRHSVIIDRNTGEEFTPLQLLATNPDGTPTGGKFLVYDSPLSEYAAVGFEYGYTVGNPDALVLWEAQFGDFVNGAQSIIDEFISSGEAKWGQLSNVVLLLPHGHEGQGPDHTSARIERFLQLWAEGSMTIAMPSTPSNYFHLLRRHALDGIKRPLIVFTPKSMLRNKAAVSDIKDFTEIKFRSVLEEPTYEDGIGDRGKVSRVLLTSGKLYYELVARKNKDNRDDVAIVRIEQLAPLPKRRLGETLDRYPNVREYFWVQEEPANQGAWPRFGLELPELLPDKLTGLKRISRRAMSAPSSGSSKVHAVEQQEIIDTAFA

SEQ ID NO: 18944 - protein, 434 aa, Synechococcus elongatus PCC 7942
MSQHLETLALHAGQKPDPTTGSRAVPIYQTTSYVFEDAEHAANLFALKAFGNIYTRLMNPTTDVLEQRLAALHGGTGAVATSSGQAAIFYAIAAITSAGQNIISTTNLYGGTINLFRHTLKRFGIEVRFVDSSDASSVAAAIDENTRLVYTESIGNPKGNVDDFEAIAAIAHDSGIPFIVDNTVSPPPLFNPLEHGADVVVLSLTKLAGGHGTSLGGIVIEKGDFPWNNGKFPEIAGPDPSYHGVNFWDAFGNHPEAVAPGLAYVLKIRTGLLRDIGATLSPFNAQQVLLGVETLPLRAERHVRNAQAVAEWLERHPLVTWVNYPGLPSHPDYDRAQRYLPNGAGAILGFGVQGGLEAGKRFISAVKLASNLANVLDAKTLVIHPASTTHQQLSPEEQAAAGVSPDFVRLSVGLEHLDDILADLDQALQASQVA

SEQ ID NO: 18945 - protein, 449 aa, Streptococcus agalactiae 2603V/R
MSKQYDYIVIGGGSAGSGTANRAAMYGAKVLLIEGGQVGGTCVNLGCVPKKIMWYGAQVSETLHKYSSGYGFEVNNLNFDFTTLKANRDAYVQRSRQSYAANFERNGVEKIDGFARFIDNHTIEVNGQQYKAPHITIATGGHPLYPDIIGSELGETSDDFFGWETLPDSILIVGAGYIAAELAGVVNELGVETHLAFRKDHILRGFDDMVTSEVMAEMEKSGISLHANHVPKSLKRDEGGKLIFEAENGKTLVVDRVIWAIGRGPNVDMGLENTDIVLNDKGYIKADEFENTSVDGVYAIGDVNGKIALTPVAIAAGRRLSERLFNHKDNEKLDYHNVPSVIFTHPVIGTVGLSEAAAIEQFGEDNIKVYTSTFTSMYTAVTTNRQAVKMKLITLGKEEKVIGLHGVGYGIDEMIQGFSVAIKMGATKADFDDTVAIHPTGSEEFVTMR

SEQ ID NO: 18946 - protein, 334 aa, Nostoc punctiforme PCC 73102
MQIFNNWNVIAKGWYIACPSHEIPKKTAKSVEVCGHKIAIFRGEDGQVRALDAYCPHLGTDLGIGKVDGNWIRCTFHHWAFDETGSCQNIPCQSEIPSQAKLQAYAIEEKYGFIWIYPDAEAPEGMTDFDELKGKEIVAQADIAFERSCHHHICMMNGIDAQHLKTIHHLDIKMDLSLHRSELGTQIDFTMRGQFPQTTWREKLGQRFLGSTYQYSMRYAHGCIGLLTMMKDVRLFPPLFMIYAYTPIAPGRTRIQPIYVTEKRKGLVGYLLSQFLLFCTRLAYYMLRDEDGKIYDNIRFNPKLLLSIDKPLAEYMEYVNQLKPSRWSKNRGVE

SEQ ID NO: 18947 - protein, 133 aa, Staphylococcus aureus
SLHAAKDEVRSRLMPINRAYNVEKLIEAIQYYQEKTNRRVTFEYGLFGGVNDQLEHARELAHLIKGLNCHVNLIPVNHVPERNYVKTAKNDIFKFEKELKRLGINATIRREQGSDIDAACGQLRAKERQVETR

SEQ ID NO: 18948 - protein, 103 aa, Glycine max
IHYVAKWKSIPFMTSRQGMGVGGGTPYGFDVGQSERGTVLKGLDLGVQGMRVGGQRLLIVPPELAYGSKGVQEIPPNSTIELDIELLSIKQSPFGTPVKIVEG

SEQ ID NO: 18949 - protein, 382 aa, Pseudomonas aeruginosa UCBPP-PA14
MIQSKLPNVGTTIFTRMSQLAAECGAINLSQGFPDFDGPPELREAVGRHIAAGHNQYAPMTGLPALREQVAKKIEQFYGRRVSADSEVTITPGATEAIFSAIQALVHPGDEVVVLDPSYDSYEPSVQLAGGRCVHVPLALPDFSIDWQRMAEAIGPRTRLVIINTPHNPSGALISREELDRLAALIRDRDIYLISDEVYEHLVFDGVAHTSVLSHEELYPRSFVVSSFGKTYHVTGWKTGYVVAPPALSAELRKVHQYVNFCGVTPLQWALADYMAGHPEHLRQLPGFYQAKRDLFCDLLLDSRFRFTRAPGTYFQCVDYSAVRPDLDDVAMAEWLTREHGVAAIPVSVFYEKAPDAMRLVRFCYAKREETLRQAAEKLCAI

SEQ ID NO: 18950 - protein, 412 aa, Escherichia coli O157:H7 EDL933
MADTRPERRFTRIDRLPPYVFNITAELKMAARRRGEDIIDFSMGNPDGATPPHIVEKLCTVAQRPDTHGYSTSRGIPRLRRAISRWYQDRYDVEIDPESEAIVTIGSKEGLAHLMLATLDHGDTVLVPNPSYPIHIYGAVIAGAQVRSVPLVEGVDFFNELERAILESYPKPKMMILGFPSNPTAQCVELEFFEKVVALAKRYDVLVVHDLAYADIVYDGWKAPSIMQVPGARDVAVEFFTLSKSYNMAGWRIGFMVGNKTLVSALARIKSYHDYGTFTPLQVAAIAALEGDQQCVRDIAEQYKRRRDVLVKGLHEAGWMVEMPKASMYVWAKIPEPYAAMGSLEFAKKLLNEAKVCVSPGIGFGDYGDTHVRFALIENRDRIRQAIRGIKAMFRADGLLPASSKHIHENAE

SEQ ID NO: 18951 - protein, 245 aa, Vibrio cholerae
SVLEVLTANGIEVIVQENNGYTPTPGISHAILTYNLKHADKADGIVITPSHNPPQDGGIKYNPPHGGPAEGELTQAIEDRANAYISQQLAGVKRMPIALAKQSELLKQVDLVKPYVDDLVNVVDMAAIQKAKLKIGVDPLGGSGIDYWRQIGNAYQLDLTLVSEAIDPSFQFMSLDKDGVIRMDCSSPYAMAGLLALKDEYDLAFGNDPDYDRHGIVTPKGLMNPNHFLAVCIDYLYRHRQGWAG

SEQ ID NO: 18952 - protein, 255 aa, Prunus persica
MGRGSVQLKRIENKINRQVTFSKRRSGLLKKAQEISVLCDAEVALIVFSTKGKLFEYSTDSCMERILERYERYSYSEKQLLANDHESTGSWTLEHAKLKARVEVLQRNCSHFMGEDLQSLSLKELQNLEQQLDSALKHIRSRKNQVMYESISELQKKDKALQEQNNLLAKKVKEKEKALAPQAESWEQQVQNQGLDCSSTLLPEALQSLNFGSGSNYQGIRNDGSGGDHEDENETPTANRPNTLLPPWMLRHLNE

SEQ ID NO: 18953 - protein, 213 aa, Vibrio cholerae
GISHAILTYNLKHADKADGIVITPSHNPPQDGGIKYNPPHGGPAEGELTQAIEDRANAYISQQLAGVKRMPIALAKQSELLKQVDLVKPYVDDLVNVVDMAAIQKAKLKIGVDPLGGSGIDYWRQIGNAYQLNLTLVSEAIDPSFQFMSLDKDGVIRMDCSSPYAMAGLLALKDEYDLAFGNDPDYDRHGIVTPKGLMNPNHFLAVCIDYLYR

SEQ ID NO: 18954 - protein, 219 aa, Vibrio cholerae
TPGISHAILTYNLKHTDKADGIVITPSHNPPQDGGIKYNPPHGGPAEGELTQAIEDRANAYISQQLAGVKRMPIALAKQSELLKQVDLVKPYVDDLVNVVDMAAIQKAKLKIGVDPLGGSGIDYWRQIGNAYQLDLTLVSEAIDPSFQFMSLDKDGVIRMDCSSPYAMAGLLALKDEYDLAFGNDPDYDRHGIVTPKGLMNPNHFLAVCIDYLYRHRQG

SEQ ID NO: 18955 - protein, 523 aa, Glycyrrhiza echinata
MEPQLVAVSVLVSALICYFFFRPYFHRYGKNLPPSPFFRLPIIGHMHMLGPLLHQSFHNLSHRYGPLFSLNFGSVLCVVASTPHFAKQLLQTNELAFNCRIESTAVKKLTYESSLAFAPYGDYWRFIKKLSMNELLGSRSINNFQHLRAQETHQLLRLLSNRARAFEAVNITEELLKLTNNVISIMMVGEAEEARDVVRDVTEIFGEFNVSDFIWLFKKMDLQGFGKRIEDLFQRFDTLVERIISKREQTRKDRRRNGKKGEQESGDGIRDFLDILLDCTEDENSEIKIQRVHIKALIMDFFTAGTDTTAISTEWALVELVKKPSVLQKVREEIDNVVGKDRLVEESDCPNLPYLQAILKETFRLHPPVPMVTRRCVAECTVENYVIPEDSLLFVNVWSIGRNPKFWDNPLEFCPERFLKLEGDSSGVVDVRGSHFQLLPFGSGRRMCPGVSLAMQEVPALLGAIIQCFDFQVVGPKGEILKGDDIVINVDERPGLTAPRAHNLVCVPVERRSGGGPLKIIEC

SEQ ID NO: 18956 - protein, 299 aa, Glycine max
  unsure (1)..(299): unsure at all Xaa locations
MCGILAVLGCVDNSQTKRARIIELSRRLRHRGPDWSGIHCYEDCYLAHQRLAIVDPTSGDQPLYNEDKTVIVTVNGEIYNHKQLRQKLSSHQFRTGSDCEVIAHLYEEHGEEFVNMLDGMFAFILLDTRDKSFIAARDAIGITPLYLGWGHDGSTWFASEMKALSDDCERFISFPPGHIYSSKQGGLRRWYNPPWFSEDIPSTPYDPTLLRETFERAVVKRMMTDVXPFGVLLSGGLDSSLVAAVVNRYLAESESARQWGSQLHTFCIGLKGSPDLKAAKEVADYLGTRHHELYFTVQE

SEQ ID NO: 18957 - protein, 299 aa, Magnaporthe grisea 70-15
MSAPDRLTFIGGGHLAQAVLSGIYSSGTAWKDSCAVAVTARRPEHAAQLRRRYPLALATTDNLHPRIWAADDRGADPDHHHHHVVFICTRPAEVPQVCREIAGALAALRAAARPTVVTMCPGVSVAQLLSWLPRGTPVVRSMPNLPVTRRQGATALFPSADAVGGSVELVAAVLGLVSPAVSVLPEESLLDVAASVSGSAPAYFYYLIESLVSAAEARGMSAETARSLVVQSCLGSGVLARDSDKPVRVLREEVCVPGGSTEKAVAHLMDKGLPDIVLGAVDRSLKANREMGCVRDEQV

SEQ ID NO: 18958 - protein, 713 aa, Rhodospirillum rubrum
MEKVLTVCPYCGSGCKINLLVENDQVIGAEPAQGVTNQGELCLKGYYGWDFLNDPKLLTPRLRKPLIRRTRDSAFEEVSWYEAINFAATRLQEIKHKYGPDSIMLTGSARGPGNEANYVMQKFARAVVGTNNIDHCARVCHGPSVAGLQVTLGNGAMSNSVEEIENTKCVFVFGYNAAVSHPIVARRILKAKEKGAKIIVCDPRFIETARIADLWLPLKNGTNMALVNAFAHVLLEENLYDKDFVAKYTEGLDDYKATVAKYTPEYAEKITGVPAQQIREAMRMYAGAETATVMWGMGVTQWSQAVDVVKGLSGLALLTGNLGKPSCGVAPVRGQNNVQGACDHGALPNMLPGYQPVTDAAARAKFEKAWGVSNLPDKPGVCLTEVPKMVKAGKLKAYYIFGEDPAQTDPDLHEVRESMRDLEFVICQEIFMTKTAMMADVVFPATSWGEHEGVYSSCDRGFQRFYKAIEPQGDVKPDWEIISLMATAMGYPMKYSNTQEIWDELRELCPIYYGATYEKMAGLGYIQWPCPDLDHPGTPYLYADKKFQTPSGKGLLFACEWRPPMEKVDAAYPLILSTVREVGHYSCRTMTGNCHALQTLADEPGYISMHSKDAKALGISDQHLVSISSRRGKIIARADIDDRINEGAVYMTYQWWVGACNELTAEHLDPISKTPEYKYSAVKVEAIADQAWAENHVQEVYSQLKADLANAVA

SEQ ID NO: 18959 - protein, 532 aa, Photorhabdus luminescens subsp. laumondii TTO1
MAIKIKVPDIGADEVEVTEIMVKVGDTVEAEQSLITVEGDKASMEVPSPQAGVVKEIIIAVGDKVETDKLIMIFDSAEGAVEAAPAEAPAAVTLSSRMAEPEPVASAAMKVHVPDIGGDEVEVTEVMVKVGDAVEAEQSLITVEGDKASMEVPAPFAGIVKEIQIKAGDKVETGSMIMVFEVAGAAPVAPVASAPAPTAEPEKAAVPVIASRSFAEEDKNDFAENSAYVHATPVIRRLAREFGVNLAKVKGTGRKGRVLREDVQAYVKDAVKRAESAPASAGGGLPGMLPWPKVDFSKFGEIEEVELGRIQKISGANLSRNWVVIPHVTQFDETDITEVENFRKQQNQEAEKKQLGVKITPLVFIIKAVAKALEEMPRFNSSISEDGQKLTLKKYINIGVAVDTPNGLVVPVFRDVNKKGIIELSRELTEMSKKARAGKLTASDMQGGCFTISSLGGIGGTAFTPIVNAPEVAILGVSRSSMKPVWNGKEFVPRLMLPLSLSFDHRVIDGADGARFITFINHAMSDIRRLVM

SEQ ID NO: 18960 - protein, 528 aa, Neurospora crassa
MLSQRLIGRAAVRSAFKPSGLPVVVSPRLRRTYATESGLFANIKSWFSSKDSGRLTVDVPVEEKDLVIIGGGVAGYVAAIKAGQEGLKVACIEKRGTLGGTCLNVGCIPSKSLLNNSHLYHQILHDSKHRGIEVGDVKLNLAQLMKAKEQSVSGLTKGVEFLLKKNGVEYIKGAGAFADEHTINVKLNDGGETSVKGKNILIATGSEVTPFPGLEIDEKRVISSTGAIALEKVPEKMLVIGGGIIGLEMASVWSRLGAQVTVIEFLDQIGGPGMDLEVAKSIQKILKKQGINFKTGTKVVSGDKTGETVKLEVDSAKGGKPETLEGDVVLVAIGRRPYTEGLGLENIGLEKDERGRVIIDSEYRTKIPHIRCVGDVTFGPMLAHKAEEEAVAVVEYIKKGYGHVNYGCIPSVMYTFPEVAWVGQSEQELKKAGVPYRVGTFPFSANSRAKTNLDTEGMVKMIADPETDRILGVHIIGPNAGEMIAEGTLALEYGASSEDIARTCHAHPTLAEAFKEAAMATHSKAIHF

SEQ ID NO: 18961 - protein, 405 aa, Oryza sativa (japonica cultivar-group)
MQRNGVVECSVCRSRLVVPSPRSVSRAYDKHRSKISSKFRALNVLLVVGDCILVGLQPILVFMSKVDGKFQFSPISVNFLTEVTKVVFAIVMLIIQSRKQKVGEKPLLARSTFIQAARNNALLAVPALLYAINNYLKFIMQLYFNPSTVKMLSNLKVLVIAVLLKFIMKRRFSVIQWEALALLLIGISINQLRTVPAGNTAFGLPVTAIAYIYTLIFVTVPSLASVYNEYALKSQYDTSIYLQNLFLYGYGAIFNFLGILGTALFQGPESFNILRGHSRATMFLICNNAAQGILSSFFFKYADTILKKYSSTVATIFTGLASAAFLGHTLTINFLLGISVVFISMHQFFSPLAKAKDDKPAELLELEDTQNHRSSESSFVNMTAGAAEDASHRIGTDERQPLLPT

SEQ ID NO: 18962 - protein, 396 aa, Pseudomonas putida KT2440
MRYAKLTQRIAGDGAAAWDIHYRALALQAEDKDILLLSVGDPDFDTPAPIVEAAIDSLRAGHTHYADVRGKLALRQAIANRHRQRSGQAVSADQVTVLAGAQCALYCVAQCILDPGDEVIVAEPMYVTYEAVFGACGAKVVPVPVKPENGFRVCPRDVAERITPRTRALALNSPHNPSGASLPRATWEALAELCVAHDLWLISDEVYSELLYEGEHVSPGSLPGMAERTATLNSLSKSHAMTGWRMGWVVGSTALATHLENLALCMLYGLPDFVQDAAVVALEHPLPELDAMREAYRQRRDLVCEQLAGCPGLKALKPDGGMFVMLDIRETGVSAQAFADYLLDSQGVSVLAGEAFGPSAAGHIRLGLVLGNEALVDACQRIARCAGELMRGQTDA

SEQ ID NO: 18963 - protein, 412 aa, Mycobacterium tuberculosis CDC1551
MSVANLKDLLAEGVSGRGVLVRSDLNVPLDEDGTITDAGRIIASAPTLKALLDADAKVVVAAHLGRPKDGPDPTLSLAPVAVALGEQLGRHVQLAGDVVGADALARAEGLTGGDILLLENIRFDKRETSKNDDDRRALAKQLVELVGTGGVFVSDGFGVVHRKQASVYDIATLLPHYAGTLVADEMRVLEQLTSSTQRPYAVVLGGSKVSDKLGVIESLATKADSIVIGGGMCFTFLAAQGFSVGTSLLEDDMIEVCRGLLETYHDVLRLPVDLVVTEKFAADSPPQTVDVGAVPNGLMGLDIGPGSIKRFSTLLSNAGTIFWNGPMGVFEFPAYAAGTRGVAEAIVAATGKGAFSVVGGGDSAAAVRAMNIPEGAFSHISTGGGASLEYLEGKTLPGIEVLSREQPTGGVL

SEQ ID NO: 18964 - protein, 419 aa, Pseudomonas aeruginosa UCBPP-PA14
MNDILPEQTPAWRYLERTFAGLLDGYGYSEIRLPILEFTELFARGIGEGTDVVDKEMYTFLDRNGESLTMRPEGTAGCVRAVLEHGLSGGGQVQKLWYTGPMFRYEKPQKGRYRQFHQIGVEVFNLPGPDIDAELIILTWRLWQKLGMADAVTLQLNTLGSSEARARYREALVAYLQERFEQLDEDSQRRMTTNPLRILDSKVESTQALLVGAPTLHDYLDEESIAHFEGLKARLDAVGLRYEINQKLVRGLDYYCRTAFEWVTDKLGAQGTVCGGGRYDGLVSQFGGKPTPGVGFAMGVERLVLLLETLGVIPAELNRPADLYVCAFGEPAELAALTLAEQLRSAIPGIRLLVNAGAGSFKSQFKKADKSGARFALILGEDEVANRVVGFKPLRDEGEQQSIAWDALPEHLAACLAQA

SEQ ID NO: 18965 - protein, 359 aa, Pseudomonas fluorescens PfO-1
MLMATMKAAIFVEKNRIVLDDKPIPEVGPLDALIRITTTTICGTDVHILRGEYPVAKGLTVGHEPVGIIERLGSQVRGFVEGQRVIAGAITPSGQSYACLCGCGSQDGPDTRHGFRAIGGWKFGNTIDGCQAEYVLVPDALANLCPIPDGLSDEQVLMCPDIMSTGFSGAERGEVSIGDSVAVFALGPIGLCAVAGARLKGASTIIGVDAVAERMTVARRLGATHVVNFREGDVVEQIMALTDGRGVDVAIEALGTQGTFESALRVLRPGGRLSSLGVYSSDLRIPLDAFAAGLGDYSIVTTLCPGGKERMRRLMAVVQSGMVDLSPLVTHRFKLDDIEAAYDLFAHQRDGVMKVAITP

SEQ ID NO: 18966 - protein, 256 aa, Triticum aestivum
MAGLGFEETKLRLGLPGGSNEAEEAAAAVRSSGKRGFAETIDLKLKLEPAGEEAPAEEDRADVAVVAAAAAENQEETATDAGGGKMKRSPSQSSVVTTAALPDPAEKPRAPKAQVVGWPPVRSFRKNILAEKSSPAAAAAFVKVSMDGAPYLRKVDLNMYKTYQDLSKALEKMFSSFTIGNCGTPGMNGMNESKLMDLLNGSEYVPTYEDKDGDWMLVGDVPWEMFVESCKRLRIMKGSEAIGLAPRAMEKCKNRS

SEQ ID NO: 18967 - protein, 219 aa, Vibrio cholerae
TPTPGISHAILTYNLKHADKADGIVITPSHNPPQDGGIKYNPPHGGPAEGELTQAIEDRANAYISQQLAGVKRMPIALAKQSELLKQVDLVKPYVDDLVNVVDMAAIQKAKLKIGVDPLGGSGIDYWRQIGNAYQLDLTLVSEAIDPSFQFMSLDKDGVIRMDCSSPYAMAGLLALKDEYDLAFGNDPDYDRHGIVTPKGLMNPNHFLAVCIDYLYRHR

SEQ ID NO: 18968 - protein, 537 aa, Glycine max
MAALNLCRMALRSSKLLSRPYHRLSVQLQMQMQPSSPPLTRKMSMDAQSVASQLNSSGLLRTQGLIGGKWSDAYDGKTIKVYNPATGESIVDVACMGGRETNDAISAAYDAYGSWSKTTAAERSKLLRKWYDLLMVHKEELAQLITLEQGKPLKESVGEIVYGAGFIEFAAEEAKRIYGDIVPAPFSDRRLFVLKQPVGVVGAITPWNFPLAMITRKVGPALACGCTVVIKPSELTPLTALAAVELSIQAGIPPGVVNVVMGNAPDIGDALLASPQVRKITFTGSTAVGKKLMAGSAETVKKVSLELGGNAPCIVFDDADLDVAVKGTLAAKFRNSGQTCVCANRIIVQEGIYEKFANALRDAVQNMKVGDGFSEGVSQGPLINEAAVKKVESLIHDATSKGAKVILGGKRHSLGLTFYEPTVISDVNSDMHISREEAFGPVAPLLRFKTEEEAIRIANDTNAGLGSYVFTNSIQRSWRVAEALEYGLVGVNEGVISTEVAPFGGFKQSGLGREGSKYGMDEYLEIKYVCFGNMNKE

SEQ ID NO: 18969 - protein, 766 aa, Mycobacterium tuberculosis CDC1551
MQVYTSATHWGVFTARVHGGDIAAVAALASDTNPAPQLQNLPGAVRHRSRIANPAVRRGWLQHGPGPSSARGAEEFVEVSWDELIELLASELRRTVDRYGNEAIYGSSYGWASAGRFHHAQSQVHRFLNMLGGYTASRHSYSAGASEVIFPHIVGAALFEALAETTTWDVIVDHTALLVAFGGLPVKNTAVMPGGTTAHPDRDYVGRYRARGGRLVSVSPLRDDIAAIAGPLDDRCRWLAPVPGTDVAIMLGLAYVLATESLADRAFLGRYCTGYERFERYLLGLDDGIPKTPEWAAALSGLAAGDLRDLARRMAEHRTLITTSLSLQRIEHGEQTVWMAATLAAMLGQIGLPGGGFGHGYSSNGVGNPPLACGLPALPQGNNPVSTFIPVAAISELLQRPGQRLAYNGRLLELPDIKCVYWAGGNPFHHHQNLPRLRRALSRVDTIVVHEQYWTAMAKHADIVVPTTTSFERDDFAASKTNPTLIAMPAMVPPYANARDDYHTFSALAHRLGFGKQFTEGRSAREWLEHMYDKWSAELDFPVPSFAEFWRTGRLELPTRTGLTWLADFRADPAAHPLGTPSGRIEIFSDTVDAFALPDCAGHPTWYEPSEWLGGPRAARYPLHLIANQPRTRLHSQLDHGGASMASKIRGREPIRIHPDDAAARELTDGDIVRVFNDRGACLAGVVIDDGLRPKVVQLSTGAWFDPADPRDPDSMCVHGNPNALSNDSGTSSLAHGSTGQHVLVQIERFTGELPPVRAHEPPRLA

SEQ ID NO: 18970 - protein, 242 aa, Vibrio cholerae
SVLEVLIANGIEVIVQENNGYTPTPGISHAILTYNLKHTDKADGIVITPSHNPPQDGGIKYNPPHGGPAEGELTQAIEDRANAYISQQLAGVKRMPIALAKQSELLKQVDLVKPYVDDLVNVVDMAAIQKAKLKIGVDPLGGSGIDYWRQIGNAYQLDLTLVSEAIDPSFQFMSLDKDGVIRMDCSSPYAMAGLLALKDEYDLAFGNDPDYDRHGIVTPKGLMNPNHFLAVCIDYLYRHRQG

SEQ ID NO: 18971 - protein, 220 aa, Vibrio cholerae
SVLEVLIANGIEVIVQENNGYTPTPGISHAILTYNLKHTDKADGIVITPSHNPPQDGGIKYNPPHGGPAEGELTQAIEDRANAYISQQLAGVKRMPIALAKQSELLKQVDLVKPYVDDLVNVVDMAAIQKAKLKIGVDPLGGSGIDYWRQIGNAYQLDLTLVSEAIDPSFQFMSLDKDGVIRMDCSSPYAMAGLLALKDEYDLAFGNDPDYDRHGIVTPK

SEQ ID NO: 18972 - protein, 438 aa, Azospirillum brasilense
MSRLFTLAAPTMAAILGLAGLPAAALAQESAAAAAEPTLSSGDTAWMLVATALVLFMTIPGLALFYGGMVRKMNVLSVVMQSFAICCLVSILWFFAGYSIAFTEGTPYFGSLSKFMLAGITKDSLTGVIPETIFVVFQMTFAIITPALITGAFADRMKFSSMLVFTGLWSLIVYAPITHWVWGPGGYLAGDGVLDYAGGTVVHINAGVAGLVAAIVLGKRKGYPNENFAPHNLVLSLIGASMLWVGWFGFNAGSAVAADGRAGMAMLVTQIAAATAAMSWLLVEWATKGKGSVLGIISGAIAGLVAITPASGFVGPTGALVIGLAAGVICYWGATGLKRALGYDDSLDAFGVHGVGGIVGAILTGVFAQEAIGGTAGALEGNVGQIWTQVYGILATIVYSAVGSFIILKVIDVVMGLRVDEDVERDGLDLALHGETIH

SEQ ID NO: 18973 - protein, 241 aa, Vibrio cholerae
VSEVLIANGIEVIVQENNGYTPTPGISHAILTYNLKHTDKADGIVITPSHNPPQDGGIKYNPPHGGPAEGELTQAIEDRANAYISQQLAGVKRMPIALAKQSELLKQVDLVKPYVDDLVNVVDMAAIQKAKLKIGVDPLGGSGIDYWRQIGNAYQLDLTLVSEAIDPSFQFMSLDKDGVIRMDCSSPYAMAGLLALKDEYDLAFGNDPDYDRHGIVTPKGLMNPNHFLAVCIDYLYRHRQG

SEQ ID NO: 18974 - protein, 492 aa, Raphanus sativus
MDPYKYRPASSYNSPFFTTNSGAPVWNNNSSMTVGPRGPILLEDYHLVEKLANFDRERIPERVVHARGASAKGFFEVTHDISNLTCADFLRAPGVQTPVIVRFSTVIHERGSPETLRDPRGFAVKFYTREGNFDLVGNNFPVFFIRDGMKFPDMVHALKPNPKSHIQENWRVLDFFSHHPESLNMFTFLFDDIGIPQDYRHMEGSGVNTYMLINKSGKAHYVKFHWKPTCGVKSLLEEDAIRVGGTNHSHATQDLYDSIAAGNYPEWKLFVQIIDPADEDKFDFDPLDVTKTWPEDLLPLQPVGRMVLNKNIDNFFAENEQLAFCPAIIVPGIHYSDDKLLQTRVFSYADTQRHRLGPNYLQLPVNAPKCAHHNNHHEGFMNFMHRDEEVNYFPSRYDPVRHAEKYPTPPAVCSGKRERCIIEKENNFKEPGERYRSFTPERQERFIGRWIDALSDPRITHEIRSIWISYWSQADKSLGQKLASRLNVRPSI

SEQ ID NO: 18975 - protein, 346 aa, Candida albicans
MTPNGSRRHSAYMGSPRSQHSSTMETGYNPYEAVQKKQELYQNNNGNSPTVIIEEDPYIPNYKELSLANKKTNYNMKIVVVGDGGCGKTCLLLAYTQNKFPSIYVPTVFENYVTAVQSPNGKTVELALWDTAGQEEYDRLRPLSYPDVDILLVCFAVDNEVSLENVKDMWFPEVNHYCPGIPIILVGTKSDLLSDMNHDASIRVAKEIGAIGLIFTSAKTMFNVRTVFNFALNHFQRNMELQEQYEKTLGSRKRISRVLGGSNGGSGNHSRHHSRNYSNVSNNRRGHLKNTSYDSTALLDQPLTEDTYVKNPYGNFGYKANVESPYNQDEFAFTRERKKKKKCVIL

SEQ ID NO: 18976 - protein, 395 aa, Campylobacter jejuni subsp. jejuni NCTC 11168
MKMDYKEQSHIIPTYKRFDIVLEKGQGVYLFDDKAKKYLDFSSGIGVCALGYNHAKFNAKIKAQVDKLLHTSNLYYNENIAAAAKNLAKASALERVFFTNSGTESIEGAMKTARKYAFNKGVKGGQFIAFKHSFHGRTLGALSLTANEKYQKPFKPLISGVKFAKYNDISSVEKLVNEKTCAIILESVQGEGGINPANKDFYKALRKLCDEKDILLIADEIQCGMGRSGKFFAYEHAQILPDIMTSAKALGCGLSVGAFVINQKVASNSLEAGDHGSTYGGNPLVCAGVNAVFEIFKEEKILENVNKLTPYLEQSLDELINEFDFCKKRKGLGFMQGLSLDKSVKVAKVIQKCQENALLLISCGENDLRFLPPLILQKEHIDEMSEKLRKALKSF

SEQ ID NO: 18977 - protein, 175 aa, Triticum aestivum
MAPTVMASSATSVAPFQGLKSTAGLPVSRRSSSAGLGSVSNGGRIRCMQVWPIEGIKKFETLSYLPPLSTEALLKQVDYLIRSKWVPCLEFSKVGFVFREHNSSPGYYDGRYWTMWKLPMFGCTDATQVLNEVEEVKKEYPDAYVRVIGFDNLRQVQCVSFIAFRPPGCEESGKA

SEQ ID NO: 18978 - protein, 113 aa, Pelargonium x hortorum
WRKYGQKMAKGNPCPRAYYRCTMAVGCPVRKQVQRCADDRSILITTYEGNHNHPLPPAAMAMASTTTAAASMLLSGSMPSADGIMNPNLLARAMLPCSSSMATISASAPFPTV

SEQ ID NO: 18979 - protein, 423 aa, Pseudomonas putida KT2440
MGTHVIKMPDIGEGIAQVELVEWFVKVGDIIAEDQVVADVMTDKATVEIPSPVSGKVLALGGQPGEVMAVGSELIRIEVEGSGNHVDVPQPKPVEAPAAPIAAKPEPQKDVKPAVYQAPANHEAAPIVPRQPGDKPLASPAVRKRALDAGIELRYVHGSGPAGRILHEDLDAFMSKPQSNAGQAPDGYAKRTDSEQVPVIGLRRKIAQRMQDAKRRVAHFSYVEEIDVTALEALRQQLNSKHGDSRGKLTLLPFLVRALVVALRDFPQINATYDDEAQIITRHGAVHVGIATQGDNGLMVPVLRHAEAGSLWANAGEISRLANAARNNKASREELSGSTITLTSLGALGGIVSTPVVNTPEVAIVGVNRMVERPVVIDGQIVVRKMMNLSSSFDHRVVDGMDAALFIQAVRGLLEQPACLFVE

SEQ ID NO: 18980 - protein, 459 aa, Pseudomonas putida KT2440
MQQIIQTTLLIIGGGPGGYVAAIRAGQLGIPTVLVEGQALGGTCLNIGCIPSKALIHVAEQFHQASRFTEPSPLGISVASPRLDIGQSVTWKDGIVDRLTTGVAALLKKHGVKVVHGWAKVLDGKQVEVDGQRIQCEHLLLATGSSSVELPMLPLGGPVISSTEALAPKTLPQHLVVVGGGYIGLELGIAYRKLGAQVSVVEARERILPTYDSELTAPVAESLKKLGIALHLGHSVEGYENGCLLASDGKGGQLRLEADQVLVAVGRRPRTKGFNLECLDLKMNGAAIAIDERCHTSMHNVWAIGDVAGEPMLAHRAMAQGEMVAEIIAGKARRFEPTAIAAVCFTDPEVVVVGKTPEQASQQGLDCIVAQFPFAANGRAMSLESKSGFVRVVARRDNHLIVGWQAVGVAVSELSTAFAQSLEMGACLEDVAGTIHAHPTLGEAVQEAALRALGHALHI

SEQ ID NO: 18981 - protein, 292 aa, Leuconostoc mesenteroides subsp. mesenteroides ATCC 8293
MDYKTLASGIEMPLLGFGVFQVQEKGAAKQAVLDAIKTGYRLIDTAASYGNEREVGEAILEAINQGIVKREELFVTSKMWVQDVSAQQATAAIQSSLQRLNLDYLDLYLIHQPYNDVFGAWRAMESAYRSGQLKAIGVSNFDIAQLTNLAEFSDIKPMLNQIEVNPFQQNKKDITYFSQYGVQVEAWAPFAEGKNDLFSNILLRKIADKHHKSIAQIVLRWLTQRNIIVVAKSVKPERMAQNLDIFDFKLTHQELAEIETLDTNSSQFFNHADPDMIKWMANREISYDVTFN

SEQ ID NO: 18982 - protein, 424 aa, Bacillus subtilis subsp. subtilis str. 168
MAIEQMTMPQLGESVTEGTISKWLVAPGDKVNKYDPIAEVMTDKVNAEVPSSFTGTITELVGEEGQTLQVGEMICKIETEGANPAEQKQEQPAASEAAENPVAKSAGAADQPNKKRYSPAVLRLAGEHGIDLDQVTGTGAGGRITRKDIQRLIETGGVQEQNPEELKTAAPAPKSASKPEPKEETSYPASAAGDKEIPVTGVRKAIASNMKRSKTEIPHAWTMMEVDVTNMVAYRNSIKDSFKKTEGFNLTFFAFFVKAVAQALKEFPQMNSMWAGDKIIQKKDINISIAVATEDSLFVPVIKNADEKTIKGIAKDITGLAKKVRDGKLTADDMQGGTFTVNNTGSFGSVQSMGIINYPQAAILQVESIVKRPVVMDNGMIAVRDMVNLCLSLDHRVLDGLVCGRFLGRVKQILESIDEKTSVY

SEQ ID NO: 18983 - protein, 456 aa, Haemophilus influenzae R2846
MTKHYDYIAIGGGSGGIASLNRAASYGKKCAIIEAKHLGGTCVNVGCVPKKVMFYGAHIAEAINNYAPDYGFDVEVKKFDFSKLIESRQAYISRIHTSYNNVLAKNNIDVINGFGKFVDAHTIEVTLADGAKEQVTADHILIATGGRPYRPNIKGQEYGIDSDGFFALTELPKRAVVIGAGYIAVELSGVLNSLGVETHLLVRRHAPMRNQDPLIVETLVEVLAQDGIQLHTNSTPSEIVKNADGSLTVKCDGQSDVTVDCAIWAAGRVPATDKIGLENAGVETNEHGYVKVDKYQNTNVKGIYAVGDIIENGIELTPVAVAAGRRLSERLFNNKPTEYLDYSLVPTVVFSHPPIGTVGLTEPQAIEQYGAENVKVYKSSFTAMYTAVTQHRQPCKMKLVCVGKDEKVVGLHGIGFGVDEMIQGFAVAIKMGATKADFDNTVAIHPTGSEEFVTMR

SEQ ID NO: 18984 - protein, 267 aa, Alpinia hainanensis
MEHKADQDRLLGFKGGKLEPPVAAVGRMGRGKIEIKRIENTTSRQVTFCKRRNGLLKKAYELSLLCDAEVALVVFSCRGRLYEYASSSVKSTIEKYKKACKDTTNDGFVSEANAQYYQQEASKLRQQINSIQISNRNLMGESLHSMNLRDLKQLESRLEKGIGKIRNKKNELLFAEIEYMQRREMELQSDNIFLRNKIAETDRVHQQMSMLPSTGATVAYEAMPTYYSGNFMQCKNRSQTNIYPQQRQRTFTSTPMRSKHGAWVLRG

SEQ ID NO: 18985 - protein, 183 aa, Escherichia coli CFT073
MQDSILTTVVKDIDGEVTTLEKYAGNVLLIVNVASKCGLTPQYEQLENIQKAWADRGFVVLGFPCNQFLEQEPGSDEEIKTYCTTTWGVTFPMFSKIEVNGEGRHPLYQKLIAAAPTAVAPEESGFYARMVSKGRAPLYPDDILWNFEKFLVGRDGKVIQRFSPDMTPEDPIVMESIKLALAK

SEQ ID NO: 18986 - protein, 442 aa, Lyngbya majuscula
MPSAIALLLAASIQLYYWARSKAMQQVGIEALSVYGGAAQLELRKLAQARQLDISRFDNLMMKEKAVSLPYEDPVSYAVNAAKPIIDRLSDADKQRIEMVITCSESGIDFGKSMSTYIQEYLGLSRNCRMFELKQACYSGTAGLQMAINLILSQTFPGAKALVIATDISRFLVAEGGEAINYDWSFAEPSSGAGAVALLVSDTPHIFQIDVGCNGYYGYEVMDTCRPNPDSEAGDADLSLLSYLDCCENAYRHYQNRVEGVDYRESFDYLSFHTPFGGMVKGAHRNMMRRLKRAKPAEIEADFQRRVMPGLVYCQQVGNIMGATLFLSLASTIDNGDFSTPRRIGMFSYGSGCCSEFYSGVVTPEGKQIQAQQGISAQLADRYSLSMEEYEQLLYHSSAVAFGTRNVTLDYQLFPGVWKKIAGKGRLVLKAIKEFHRKYEWV

SEQ ID NO: 18987 - protein, 426 aa, Sinorhizobium meliloti 1021
MGEFIIKMPDVGEGVAEAELVEWHVKPGDPVREDMVLAAVMTDKATVEIPSPVTGKVLWLGAEVGDTVAVKAPLVRIETAGEAGEAAPDSIPEALAEQVLDEPVAVSSRLEAKAPPQPEKPAPKPAPAPREAPDLSAKPLASPAVRLRARESGIDLRQVAGTGPAGRITHEDLDLFISRGAEPLPAQTGLVRKTAVEEVRMIGLRRRIAEKMSLSTSRIPHITYVEEVDMTALEDLRATMNRDRKPEQAKLTILPFLMRALVKTVAEQPGVNATFDDHAGVIHRHAAVHIGIATQTPAGLTVPVVRHAEARGIWDCAAELNRLADAARTGTATRDELTGSTITISSLGAIGGIASTPVINHPEVAIVGVNKIAVRPVWDGAQFVPRKIMNLSSSFDHRVIDGWDAAVFVQRLKTLLETPALIFVEG

SEQ ID NO: 18988 - protein, 3195 aa, Lyngbya majuscula
  unsure (1)..(3195): unsure at all Xaa locations
MAELNLNRDLGTSNSEVVQLTELGNGVVQITMKDESSRNGFSPSIVEGLRHCFSVVAQNQQYKVVILTGYGNYFSSGASKEYLIRKTRGEVEVLDLSGLILDCEIPIIAAMQGHSFGGGLLLGLYADFVVFSQESVYATNFMKYGFTPVGATSLILREKLGSELAQEMIYTGENYRGKELAERGIPFPVVSRQDVLNYAQQLGQKIAKSPRLSLVALKQHLSADIKAKFPEAIKKELEIHQVTFNQPEIASRIQQEFGETVIPNLIQSTVEQKIPNPQPVQLRIPSYGLLKNLTWMPQERRKPKSTEVEVQIKAVPVNFREVLNVLGIFQEYIKKRYRSGIISAENLTFGVEGVGTVVAVGSDVSQWKVGDEVILAYPGNAFSSFVICSPDDLLAKPSDLSMVEAATIFMSFFTAYYGLHNLAKVQPGERVLIHAASGGAGQAAVQLAQFFGSEVFATTSPHKISVLREQGIKHVMNSRTTEFASEVRELTQGNGVDVIFNSLTHGEYIPKNIDILAPGGRYIEIGRLNIWSHEQVSQRRPDVKYFPFDMSDEFVRDKQFHAKLWDDLALLFESGSLKPLPYKVFPSEDVVEAFRHLQHSKHIGKIVVTMPELYNGVKNSSQQANQESMSHQEELLHQLQSGDISLENAEQLLLGLTDQQILATVPNNGQNKLINTDKTEQILSLLSSGEISLENAQNLLETVDLNSPTKKNLPTAVPNQGQSNQDEAILNQLQSGEVSLEDAEQLLLEIQQKESVTTKSIPDQRITDDIAIIGISCRYPGAKNWKEFWENLKHGVDSVTEPPPGRWEGRSWYHSDPEHPGTACSKYAAFLDDIDKFDPLFFQISPGEAELIEPQQRIFLEEAYHAIEDAGYAPDSLKGKHCGVFVGAASSDYIKFLSNSGFGHHRLVLSGTMLSVLPARIAYFLDLKGPVVAVEAACSSSLVAVHQACESIKRGESEIAIAGGISTMLTPDFQVLSSQFQMVSPEGRCKSFDAEASGIVWGEGCGAILLKRYEQAVQDQDHIYGIIKGTGTNYDGSTNGXSAPSSKSQARLAENIYQQFGINPETISYLEAHGTATPLGDPIEVEAFTEAFSKWTAQKQFCAIGSVKTNIGNAATAAGMSSLIKTILCLKNQKLVPSLHFNQPNPNIDFANSPFYVNTEFKAWEVPTGIPRRAAVNSFGLNGTNAHVVVEEAPIEDNRQTSPVSPQGGKATGNSEDYLENSVHLLTLSAKTETALGEVISSYQNYLKTNPNLRLGDVCYTASTGRTHFTHRLAVVAPNQQELVEKLRQHQEGKKLAGITSGELLNNTTVAKIAFLFTGQGSQYINMGKQLYQQAPTFRQAINQCEEILSSVETFQETSLRNILYPTDKNSSGSSLLGQTAYTQPALFAIEYALFKLWQSWGIEPDVVMGHSVGEYVAATVAGVFSLEDGLKLIAARGSLMQKLPGDGKMLWAMAPESKVLETLKAKDLSEKVAIAAINGPQSIVISGEGKAVEAIATNLESAGITTKPLKVSHAFHSPLMEPMLAEFEAAAKEITYEQPRIPLISNVTGKQVTEQITTAEYWVNHVRQPVQFAQSMKTLYQEGYELFLEIGPKPVLLSMGRQCLPEKIGVWLPSLRPGVEECQQMLSSLGKLYVEGAKVDWIAFEQNYARQKVALPTYPFQRERYWVSSQNGYEQKSYWLKGKEQHPLLGEKINLAGIEDQHRFQSYIGAESPGYLNHHQVFGKVLFPSTGYLEIAASAGKSLFTSQEQVVVSDVDILQSLVIPETEIKTVQTVVSFAENNSYKFEIFSPSEGENQQTPQWVLHAQGKIYTEPTRNSQAKIDLEKYQAECSQAIEIEEHYREYRSKGIDYGSSFQGIKQLWKGQGKALGEMAFPEELTAQLADYQLHPALLDAAFQIVSYAIPHTETDKIYLPVGVEKFKLYRQTISQVWAIAEIRQTNLTANIFLVDNQGTVLVELEGLRVKVTEPVLTQKSAFKEQLKSASVSERQELLTTQISSAIVNILGLRDGQQIERHQPLFDLGLDSLMAVELKNQLESNLGTSFSSTLLFDYPTVESLVEYLANNVIPIDSFSELPTLIPHPEQRYQPFPLNDIQQAYWIGRNQIFDLGNIATHIYIEVDCENLNLESLHQAWRRLIDHHDMLRMVVLADGNQQILEQVPPYEIEILNLSEESPETIASELEQIRNQMSHEVLPTNQWPLFHLRATRLNEQCFRLHASIDMLIFDAWSTYVLFKQWSELYNNPQSSLPATEISFRDYVLAELELKDSPQYLSSQQYWFNRLDNLPPAPEIPQAKVTSAITDPQFNTHTAQLSQSDWQQLKNKASKANLTPSGVLLSAFASVLNYWSKSSKFTLNLTLFNRLPLHPQVNELIGDFTSVILLEVDNSQAVPFISRAQKLQRQLWEDLEHRYISGVEVQRELYRRGRSQPMGVVFTSTLGLKSLADEEVGRGFGLEHFGEVVYSAAQTPQVLLDHIVTEEKGALAFSWHTVEGLFPEGLIEQMFEAYCDLLQQLATSDEPWMETYHQLLPTAQLALQAQVNQTTQSWSEDILHSLFVKQVQVQSEATAVISPQKSLTYGELYQRSHQLGHGLRKLGVKPNQLVAVVMEKGWEQVVAVLGILMSGGAYLPIDPGLPQERQWYLLEQAQVTQVLTQTHLKQSLGWPEGIKCWSVDTEELAEYDPNPLEPVQTSEDLAYVIYTSGSTGLPKGVMIDHRGAINTILDINQRFKVTPSDRVLALAALNFDLSVYDIFGVLGAGGAIVMPPPKAAKDPACWRELIIAHEVTLWNSVPALMQMLVEHLLGTSATAVGDLRVVMLSGDWLPVDLPSKIQSLWSNVQVMSLGGATEASIWSIGYPIEKVGSDWKSIPYGKPLLNQSFYVLNELMEPRPVWVPGQLYIGGVGLAKGYWKNEHKTQASFITHPVTQEPLYKTGDLGRYLPDGNIEFLGREDFQVKINGYRVELGEIEVALKQFPGIKEAIVTAIGESQQSKRLVAYAVFKEKSVISDSSLTDIHQTEDKNEVGQPDQEINCTSEQLRKYLWQKLPEYMVPDDYVILEALPLTANGKVDRKRLPKPQRQTIADTNQNILPQTKTEQQIAAVWTEVLELEEVGIHDNFFAIGGNSLLVIRVHNKLQELLGIELKVVDLFANPTVHFLSQHLTQIGSKELFMETSKTRGDERVKKGTTRKERRNIRKSLRGKK

SEQ ID NO: 18989 - protein, 395 aa, Vibrio vulnificus CMCP6
MFSQLPTPALDPILSLTVAFRNDPRDQKVDLGIGVYKNNKGETPIMRAVSQAQKIVADTQTTKSYVGLAGCEEFNQSMVNLLLAGTSVLDRVSAIQTPGASGALRMLGDLMKVAQPDTTVWISNPSYVNHKPVMEAAGLKVRYYRYFSPETKQVDIGQMLDDLATAGPKDVVLLHGCCHNPTGADIDFAAWQAITDLAVKNGFTPFVDIAYQGFGDGLEEDAKGLQFMADRVEEMLITTSCSKNFGLYRERTGAAIVIGKNAKESSNAKGKLLTLARSTYTMPPDHGAALVKTILQNVELTTTWKQELCEMQQRLLNLRQTLCNELRNQHNTSQFDFIESHKGMFTVLGFTPEQMGTLRDEYGIYGVGDGRINIAGLTEAHIPYVADAIVKVSQR

SEQ ID NO: 18990 - protein, 464 aa, Sinorhizobium meliloti 1021
MKEISCKLLVLGAGPGGYVAAIRAGQLGVNTVIVEKAKAGGTCLNVGCIPSKALIHAADEYHRLRAAASGKGPLGLSLSAPAIDLRRTIAWKDGIVGRLNGGVTGLLKKAGVKAVIGEGRFVDGKTVDVETETGLQRIRAEAIVIATGSAPVELPDLPFGGSVISSTQALALTDVPQTLAVIGGGYIGLELGTAFAKLGSKVTVLEALDRILPQYDADLSKPVMKRLGELGVEVFTRTAAKRLSADRRGLLAEENGRAFEVPAEKVLVTVGRRPVTDGWGLEEIDLDHSGRFIRIDDQCRTSMRGVYAIGDVTGEPMLAHRAMAQGEMVAEIVAGHKRSWDKRCIPAVCFTDPEIVGAGLSPEEARAAGIDVKIGQFPFQANGRAMTTLSEDGFVRVIARADNHLVLGIQAVGHGVSELSATFALAIEMGARLEDIAGTIHAHPTQSEAFQEAALKTLGHALHI

SEQ ID NO: 18991 - protein, 452 aa, Bacteroides thetaiotaomicron VPI-5482
MRNIYSIYKEHYKALISLGLPIVIGQIGVIVLGFADTLMIGHHSTIELGAASFVNNVFNLVIIFSTGFSYGLTPIVGGLYGTHQYASAGQALRNSLLANLLVAFLLTIGMTVLYFNVGNLGQPEELIPLIKPYYLVLLASLVFVMLFNGFKQFTDGITDTKTAMWILLGGNVLNIIGNYILIYGKLGLPEMGLLGAGISTLFSRIMMVVVFIIVFMRSPRFLRFKLGFYRLGWSKAIFGRLNSLGWPIAFQMGMETASFSLSAVMIGWLGTIALASHQVMLAISQFTFMMYYGMGAAVAVRVSNFNGQGDILNVRRSAYAGFHLMMALGVVLSSIVFLCRNYLGGWFTDSTEVAAMVTSLILPFLVYQFGDGLQITFANALRGISDVKLMMLIAFIAYFLISLPVGYFCGFVLEWGIIGVWMAFPFGLTSAGLMLWWRFHHKTKLPPSIQNS

SEQ ID NO: 18992 - protein, 268 aa, Prochlorococcus marinus subsp. pastoris str. CCMP1986
MTSKIAVIGFGNIAKAIITPLFDKKLLKPKDVYCLVNTKKSLENIRKNYKYDINIFQANSKGSEIIWDCEVKFLSVKPQQLKNIIELEKNKNYLLVSILAGVSLEKLIKKFPNHKCVRVVTNIPITIGKGLTGISWGDEIKEAQKQFIKRLFENSSKIYEFPEDLLDIFLSLTSSGPAIVALIIEALSDGGLSGGLQKRLSEELVVEMILGTVSLIKETNLTTAELKNMVTSPGGTTISALRVLENRSLRSALIEAVVSASNRSKEFR

SEQ ID NO: 18993 - protein, 457 aa, Arabidopsis thaliana
MASLSQITLPRAPSSEIGLLRRRLERPIIRTRIGFNGRIASVLTNAGDQAVSVKASVSQKVIEEEAKVIVGTYARAPVVLSSGKGCKLFDPEGKEYLDCASGIAVNALGHGDPDWLRAVTEQAGVLAHVSNVYYTIPQIELAKRLVASSFADRVFFCNSGTEANEAAIKFSRKFQRFTHPEDKEVATGFIAFTNSFHGRTLGALALTSKEQYRTPFEPIMPGVTFLEYGNIQAATDLIRSGKIAAVFVEPIQGEGGIYSATKEFLQSLRSACDAAGSLLVFDEVQCGLGRTGLMWAYEAFGVTPDIMTVAKPLAGGLPIGAVLVTEKVAETINYGDHGSTFAGSPLVCSAAIAVMDKVSKPSFLSSVSNKGRYFRDLLVKKLGGNSHVKEVRGEGLIIGVELDVPASSLVDACRDSGLLILTAGKGNVVRIVPPLVISEEEIERAVEIMSQNLTALD

SEQ ID NO: 18994 - protein, 332 aa, Pirellula sp. 1
MTSLLPIVNEGLPTGLVPTFASRVAGGALRRNQLNQLQINLGKLCNQTCTHCHVDAGPTKKRENMDDRTADRLLELVAECSSITTVDLTGGAPEMNPNFRRLATTFRAAGLRVIDRCNLTILSEPGFDWVAEFLAEHEIDVVASLPCYLEDNVDGQRGGGVFGRSIDGLLKLNELGYRRGSATHRLDLVYNPTGPSLPPDQAKLEADYRRELSARYGIEFGSLLTITNIPIRRYAQYLQKRGLLDDYLRLLSDNFNPNATDEVMCRSLVSISWDGQIYDCDFNQMIGLSQKPRTVWSIGSLDELIDQPIALADHCYGCTAGAGSGCGGALLR

SEQ ID NO: 18995 - protein, 200 aa, Streptomyces avermitilis MA-4680
MTRLILATRNAGKITELRAILADAGLTHDLVGADAYPDIPDVKETGVTFAENALLKAHALARATGLPAVADDSGLCVDVLGGAPGIFSARWSGRHGDDRANLDLLLAQLSDISEAHRGAHFACAAALALPDGTERVVEGQLRGTLRHTPTGTNGFGYDPVLQPEGETRTCAELSAEEKNAISHRGKAFRELVPVVRELLG

SEQ ID NO: 18996 - protein, 192 aa, Schizophyllum commune
MQTIKCVVVGDGAVGKTCLLISYTTNKFPSEYVPTVFDNYAVTVMIGEDPYTLGLFDTAGQEDYDRLRPLSYPQTDVFLVCFSVTSPASFENVKEKWFPEVRHHCPGVPCLIVGTQIDLRDDSQVIEKLARQKQRPVTSDQGERLVRELGAVKYVECSALTQKGLKNVFDEAIVAALEPPVVKKKGPKCVIL

SEQ ID NO: 18997 - protein, 308 aa, Staphylococcus epidermidis ATCC 12228
MGKIAVVFPGQGAQKVGMASDLYNEEERSTRVLNLAQETVDFDLLETMFTDNDGKLGETENTQPALLTHSVALLESLNHLKVDYTMGHSLGEYSSLVASGVLSFEDAVRIVRKRGQLMARAFPNGVGGMAAVLGLDYDDVDKICQTLSTKEQLIEPANINSPGQIVVSGHKSLIDELVKKGKELGAKRVLPLAVSGPFHSSMMKVIEEDFANFINQFEWHNANYPVVQNVNAKGETDAEVIKRNMVKQLYSPVQFIQSTKWLINQGVDHFIEIGPGKVLSGLIKKINRDVKITSIQTLEDVKGWNNHE

SEQ ID NO: 18998 - protein, 294 aa, Pseudomonas syringae pv. syringae B728a
MLAEQGAHHPLILDTFEQASEALGYDLWALTQNGPAELLNQTDKTQPAILTASVALWHVWLAEGGAVPAFVAGHSLGEYSALVAAQSLSLADAVKLVERRGQLMQEAVPAGQGGMAAILGLDDADVIAACAEAAQGEVVSAVNFNSPGQVVIAGSAEAVKRAMELCKARGAKRALPLPVSVPSHCELMRPAAERFAEAVEAIEWQAPEIALVQNVSASAVSDLATLKRDLLEQLYKPVRWVESIQCLASRGATQLVECGPGKVLAGLNKRCADGVMTYNLDTPDAFAAARAALA

SEQ ID NO: 18999 - protein, 457 aa, Bacillus subtilis subsp. subtilis str. 168
MATEYDVVILGGGTGGYVAAIRAAQLGLKTAVVEKEKLGGTCLHKGCIPSKALLRSAEVYRTAREADQFGVETAGVSLNFEKVQQRKQAVVDKLAAGVNHLMKKGKIDVYTGYGRILGPSIFSPLPGTISVERGNGEENDMLIPKQVIIATGSRPRMLPGLEVDGKSVLTSDEALQMEELPQSIIIVGGGVIGIEWASMLHDFGVKVTVIEYADRILPTEDLEISKEMESLLKKKGIQFITGAKVLPDTMTKTSDDISIQAEKDGETVTYSAEKMLVSIGRQANIEGIGLENTDIVTENGMISVNESCQTKESHIYAIGDVIGGLQLAHVASHEGIIAVEHFAGLNPHPLDPTLVPKCIYSSPEAASVGLTEDEAKANGHNVKIGKFPFMAIGKALVYGESDGFVKIVADRDTDDILGVHMIGPHVTDMISEAGLAKVLDATPWEVGQTISPASNAF

SEQ ID NO: 19000 - protein, 355 aa, Pseudomonas putida KT2440
MYPKNTWYVACTPDEIATKPLGRQICGEKIVFYRARENQVAAVEDFCPHRGAPLSLGYVEDGNLVCGYHGLVMGCDGKTVSMPGQRVRGFPCNKTFAAVERYGFIWVWPGDQAQADPALIPHLEWAVSDEWAYGGGLFHIGCDYRLMIDNLMDLTHETYVHASSIGQKEIDEAPPVTTVTGDEVVTARHMENIMAPPFWRMALRGNGLADDVPVDRWQICRFTPPSHVLIEVGVAHAGKGGYHAEAQHKASSIVVDFITPESDTSIWYFWGMARNFAAHDQTLTDNIREGQGKIFSEDLEMLERQQQNLLAHPERNLLKLNIDAGGVQSRKVLERIIAQERAPQPQLIATSANPA

SEQ ID NO: 19001 - protein, 446 aa, Leuconostoc mesenteroides subsp. mesenteroides ATCC 8293
MNYDVIFIGSGHAAWHGAQTLARSGKKVALVEENKVAGTCTNFGCNAKILLDGPAEMMHHLNHYHGIGINDTPNIIWPELMAYKHQVIDPLSGGLAHMLSVDGIDIINGHAKFLNNEKIVVVDQVYQAEKFVIATGQRPAKLPISGSEFMKDSTDFLDLPDMPKSILFVGAGYIAMEFASIAHAAGSDVTLIEYGNHVLNGFDEVYSQKVIEDMTEKGIHFTFNQAVSSVSLLANGQYQVDTAQGETYYVDYVMDTTGRVPNIEELALDDINVLYDKQGILVNDHLQTSIDNIYASGDVISKAIPRLTPTATFESNYIASVLLGNQEPINYPVVPTVAFTLPRVAQIGVTIDEAAKDENLQVHEIPYGRVMRFQTLNDVHAAIKIIVNKNKQLVGAALIGDFAPEVVNALVPVINQQYTSSDIKSQIYAFPTDSGIILPMIANYLA

SEQ ID NO: 19002 - protein, 192 aa, Haemophilus influenzae R2846
MKKFAMVFPGQGSQTVGMLADLATEYPIVIETFKQASDALGYDLWYLVQQGPAEELNKTWQTQPALLAASVAIYRVWQEKFPQLKPEVMAGHSLGEYSALVCAGVLDFQDAIKLVELRGKLMQQAVPEGTGAMYAIIGLDNEAIINACKQAEEGEVVSAVNFNSPGQVVIAGAKAAVELDSGHIALVAMPSP

SEQ ID NO: 19003 - protein, 647 aa, 'Chlorella' ellipsoidea
  unsure (1)..(647): unsure at all Xaa locations
MAAFLNSHLLAGWRPVLPVPARPHVHASASNGNGVATAPLPTITDIYGTTAALGPDMNAAGAYSMPAKEAEPVSPEVQALIDEQGIDFELSGLKYLSNEGRLKALAKKATKVEKMKNKKSGDRIWSDISELAALVRSGEKTWEELNLDDVDVRTKWAGLFHRKKRAPGTFMMRLKVPNGEITSKQLRVLGEQLKPFGDELGVGDITSRANFQLRGIPMAETDNVIKAVQGCGLSNVMTGMDNVRNMTGSPIAGIDPHELLDIRPLNYEINNMITNYGKGNHELSNLPRKINLALSPSRDDFPHVFINDVGLQAIRHPETGEVGFNVELGGYFSIKRNTQSINGNTYLRQDQVVAYCKALLEFFRDAGNREDRQKAGLMWLVEACGVDNFRKNVAQRMGLDDLPGHVHVEYPDVWKRRDVIGFHPQKQDGYYWACACVPSGRITADDYLAFAEIADRYGNGTARATVECNILFPFIPESKLEDLKKEPLFQKFSLEPKPLTRGLVSCTGAQFCGVAIIETKQRAMAIAAKLENELDIPQTVRMHWTGCPNSCGQVQVADIGLMGGPARHEGKAVEGVRIFTGGKVGEGASLGAEIEKGVACNDEVLLPKLREIXINQYGRHREEDGSLQDGDWRAGRPRLGPSRMTVL

SEQ ID NO: 19004 - protein, 382 aa, Thermus thermophilus
  unsure (1)..(382): unsure at all Xaa locations
MRGLSRRVQAMKPSATVAVNAKALELRRQGVDLVALTAGEPDFDTPEHVKEAARRALAQGKTKYAPPAGIPELREALAEKFRRENGLSVTPEETIVTVGGKQALFNLFQAILDPGDEVIVLSPYWVSYPEMVRFAGGVVVEVETLPEEGFVPDPERVRRAITPRTKALVVNSPNNPTGAVYPKEVLEALARLAVEHDFYLVSDEIYEHLLYEGEHFSPGRVAPEHTLTVNGAAXAFAMTGWRIGYACGPKEVIKAMASVSSQSTTSPDTIAQWATLEALTNQEASRAFVEMAREAYRRRRDLLLEGLTALGLKAVRPSGAFYVLMDTSPIAPDEVRAAERLLEAGVAVVPGTDFAAFGHVRLSYATSEENLRKALERFARVL

SEQ ID NO: 19005 - protein, 367 aa, Hyacinthus orientalis
MGDPVTFQFFPVGEPEEEESPGGESTVAAGGAPRGHWAEVKFVEKEADVSPAIKKSRRGPRSRSSQYRGVTFYRRTGRWESHIWDCGKQVYLGGFDTAHAAARAYDRAAIKFRGVDADINFNLSDYNEDLKQMMNLAKEEFVHILRRQSTGFSRGSSKYRGVTLHKCGHWEARMGQFLGKKAYDKAAIKSSGREAVTNFEPSSYEREVLTEADSDAIGHDIDLNLRISQPNVSSPKRRDNPVGVQFHLGSFESSDAKKAMIDTHSSILVGQPHTAAMTSEASRVWSALYPGFYPPIELRAKDKMSMVGSAALPNWTWQLHGPMPSPMFTSAASSGFATTHATSSITPPASHHLQFPPPPNTNYYSRS

SEQ ID NO: 19006 - protein, 1117 aa, Adiantum capillus-veneris
MSSTRHSYSSGGSGKSKHGRRIAQTSANAKLYAAYEESSESGSFDYSQSVSAGKEGISSQLVTAYLQRMQRGGLVQQFGCLIAVEEETFRVLHMCEAPEMLDVATQAVPTMGQYSRLCIGADVRTLLSPASASALDRVIGVVDVSMFNPITVQSRSSGKPFYAILHRNDVGLVIDLEPIRPDDASITGGALQSHKLAAKAIARLQSLPGGDIGLLCDSVVEEVHELTGFDRVMAYKFHEDEHGEVVAEIRRTDLEPYIGLHYPATDIPQAARFLFMKNRVRMICDCRLPPVKLIQDKTLSQPMSLTGSTLRAPHGCHTQYMANMNSISSLVMAVIVNDSDDDSAGHSSQGIKLWGLVVCHHTSPRYVPFPVRSACEFLMQVFSLQLNMEVGMAAQVREKHILRTQTLLCDMLLRDAPIGIVSQSPNIMDLVTCDGAALYYGKKCWLLGTTPTEAQIVDIAAWLLDCHKDSTGLSTDSLAKTGYPEASCLGDAVCGLAAAKITATDFLFWFRSHTAKEVRWGGARHDPEERDDGRRMHPRSSFKAFLEVVKQQSLPWEDVEMDAIHSLQLILRGSFQDIDDSNTKTMIHARLNDLKLQGLDELSTVASEMVRLIETATAPILAVDGQGLINGWNGKVAELTGLSFETAMGKSLAKELVHEESKTIVERVLHLALEGEEEQDIEIHLRTYDQHKQKGVVILIVNTCCSRDVSNNVVGVCFVGQDVTGQKLVLDRFIRIQGDYKAIVQSLNPLIPPIFGADEYGFCSEWNAAMEKLSNWRREEVLGKMLVGEIFGLQMVCCRLQGQDVVTKLMIVLNDAVNGQESEKFPLVFYDRNGRRVEALLIASKRTDADGRITGVFCFLHTASPELLQALIIKRAKEKVDKELSYVKEELKKPLEGLAFTRTVLEGTNLTIEQRQLIKTNAWCERQLRKILEDDLNNIEEGYMDLEMSEFFMGSVIDAVISQGMAASRGKGVQILTEIPNDVKLMCLFGDQARLQQVLADLLFCAINHATTTNEDEKDWVTIKVSRTKTRLDDGVHLMHFESRISHSGQGISEALVEEMTNKSQKWTPEGLAISISCTLIRLMNGDVKYTTDAGNKCFLVTIQFPLAHRDDATSVR

SEQ ID NO: 19007 - protein, 208 aa, Oryza sativa (japonica cultivar-group)
MARPTMLACCKLYISESRNAAALRAIEQAACGGGAVVVNRFTDDAYNRGRTLASIRRQLGYFKPNSSGDQWRGAPETDALPVAPDAGPERSPRSKGVVVVGATGWVDNYNVPVRTGDVEAARRIARAVSERGGGLPSVQAMGLAHGGGVVEVACNLLDPARVGAEQVQGMVERLAAGEGLSVGKGYFTDYSQDKIVELYFKSAANTEG

SEQ ID NO: 19008 - protein, 491 aa, Ceratodon purpureus
KSVGQSAESVPAGAVTAYLQRMQREGLIQNFGCMVAVEEPNFCVIAYSENASEFLDLIPQAVPSMGEMDVLGIGTDIRTLFTPSSSAALEKAAATQDISLLNPITVHCRRSGKPLYAIAHRIDIGIVIDFEAVKMIDVPVSAAAGALQSHKLAARAITRLQALPGGDIELLCDTIVEEVRELTGYDRVMAFKFHEDEHGEVVAEIRRMDLEPYMGLHYPATDIPQASRFLLMKNRVRLIADCYASPVKLIQDPDIRQPVSLAGSTLRAPHGCHAQYMGNMGSIASLVMAVIINDNEEYSRGAIQRGRKLWGLVVCQHTSPRTVPFPLRSVCEFLMQVFGMQLNLHVELAAQLREKHILRTQTLLCDMLLRDAPIGIVSQTPNIMDLVKCDGAALYYGKRVWLLGTTPTENQIKEIADWLLEHHNDSTGLSTDSLADANYPGAHLLGDAVCGMAAAKITAKDFLFWFRSHTATEVKWGGAKHDPDEKDDGRK

SEQ ID NO: 19009 - protein, 404 aa, Mycobacterium avium subsp. paratuberculosis str. k10
MREAPHVLGIVLAGGEGKRLYPLTADRAKPAVPFGGAYRLIDFVLSNLVNARYLRICVLTQYKSHSLDRHISQNWRLSGLAGEYITPVPAQQRLGPRWYTGSADAIYQSLNLIYDEDPDYIVVFGADHVYRMDPEQMVRLHIDSGAGATVAGIRVPRSEATAFGCIDSDESGRIRKFVEKPLDPPGTPDDPETTFVSMGNYIFTTKVLIDAIRADADDDHSDHDMGGDIIPRLVDDGMAAVYDFSDNEVPGATDRDRGYWRDVGTLDAFYDAHMDLVSVHPVFNLYNKRWPIRGESENLAPAKFVNGGSAQESVVGAGSIISAASVRNSVLSSNVVVDDGAIVEGSVIMPGARVGRGAVVRHAILDKNVVVGPGEMVGVDLERDRERFAISAGGVVAVGKGVWI

SEQ ID NO: 19010 - protein, 638 aa, Streptomyces verticillus
MRPVCGIVAIRSADGGLDGGELTAPMADLRPRGPDGEGTWVSPTGRAALGHTRLAVIAPDAGRQPVAGPDGTVRLVVNGEFYGYREIRAELRAAGCRFRTGSDSEIALHLYLRDGRRALERLRGEFAFVLWDERRATLFAARDRFGVKPLYYTERDGRLYVASTVRALLSCGAPARWDTAAFAAHLQLGLPPDRTLFAGIRQLPPGCHLIADAHGTRVTPYWDLDYPPAGELAARGSLDDHLDAVRERTDEAVRLRTVADVPLACHLSGGLDSSAVAASAARHTRLTAFTVRFDDPAFDESAVARRTAAHLAIDHREVASERAHFADHLRDVVRAGEMVQENSHGIARYLHSAHIKKAGFTAVLAGEGGDELFLGYPQFRKDLTLSLSADARDKADRGYARLVAAGLLPPYLRTLLGTLGFLPSWIVDRHLAVTQPVAALLRPDFAAELARADAAAPLLAAGAGLLAGRAPAHQATYLFAKTWLPGYLLAAERLDAAQAVEVRLPLFDHHLFDLVRHTPPAWYDKDGTGKYPLRAAMRHRLPREVTEGRKQGFLAPPMADDDTLLDALRERLAGPGAGDDPFFDPHAVRALLDRLAAAPPGQRSGGEKLLQLVASTAELADEFGLTTAPSGQKGGNGG

SEQ ID NO: 19011 - protein, 331 aa, Dechloromonas aromatica RCB
MGSFKALLIEEHDGKVSSGFVQLDEGRLDAGNVTIRVAYSSINYKDALAATGAGKIIRRFPCVGGIDLSGTVIESGDPRFKPGDQVIATSFDIGVAHHGGYAEIARVPGDWVVPLPAGLSLYEAMALGTAGFTAALGVVRMEENGLRPEKGPVIVTGATGGVGSLAIDMLARTGYHVVALTGKESEADYLRSLGAAEVLLRQSLDLTKIRPLDRARWAGAVDNLGGDVLAWIASTMEQGGTIASIGLAASMSLNTTVAPFILRGVSLLGIDSGYIREPYRSGVWQRLATDLRPPHLASMSRRIPFDDLPATFGEYIAGRAKGRVVVEIAGG

SEQ ID NO: 19012 - protein, 294 aa, Oryza sativa
MALRSAAGRLASSSRRRLLSPPTSIHTAFLHSHATSFGYKQVAEEDKSKLVGNVFSSVASSYDLMNDLMSVGLHMLWKDRLISKLNPFPGMKHLDVAGGTGDVAFRALERINSVSHRAMQGTLTDIEEETQIYVCDINPNMLNVGKKRASERGYKEGHCLSWIQGDAEALSFEDGSMDGYTIAFGIRNVTHIEKALSEAYRVLKRGGRFLCLELSHVDVPLFKEIYDVYSFSVIPAVGELVAGDRQSYQYLVESIRRFPNQEKFAQMIQEAGFERVEYENLVGGVVAIHSGLKL

SEQ ID NO: 19013 - protein, 346 aa, Lactobacillus johnsonii NCC 533
MKYAEFVKAGEMKIIDKPMPKIEKNDDVIIKVVRTCVCGSDLWAYNGVEEQGHENGGHEVIGIVQEIGKDITTVKKGNFVIAPFTHGCGHCRACLAGFDGVCMSHDLSENFSNGYQAEYVRFQHAQWSLVKIPGKPDDYTEGMLKSFLALADVMATGYHAARVADVQPGDSVIVLGDGAVGLSAIIAAKLRGAKQIVSTSRHADREALAREFGATENVAERDEEGIQNLLAITRSGADAVLECVGSKLSNEEALQVGRPGSRVGRVGLPHGAELNPGLIFYKNMSVAGGPASVTTYDKQVLLTAVLDGRINPGKVFTKTFTLDQINEAYQEMADRKAIKSYIKVND

SEQ ID NO: 19014 - protein, 559 aa, Arabidopsis thaliana
MEAALAACALPSLRILNTKPRFRCSFSNPSLPISPNSLITRKSSRFTTAVSSPPSSSAATSTNSPPEPEALFEPGSDKFDWYANWYPVMPICDLDKKVPHGKKVMGIDLVVWWDRNEKQWKVMDDTCPHRLAPLSDGRIDQWGRLQCVYHGWCFNGSGDCKLIPQAPPDGPPVHTFKQACVAVYPSTVQHEIIWFWPNSDPKYKNIIETNKPPYIPELEDPSFTKLMGNRDIPYGYDVLVENLMDPAHVPYAHYGLMRFPKPKGKYIICISNSCFNPFTNLQILLAEKIDREGGKPLEINVKKLDNKGFFSKQEWGYSNFIAPCVYRSSTDPLPEQEHEYPAPAASDKAALSKRRLSLIFICIPVSPGRSRLIWTFPRNFGVFIDKIVPRWVFHIGQNTILDSDLHLLHVEERKILERGPENWQKACFIPTKSDANVVTFRRWFNKYSEARVDWRGKFDPFLLPPTPPREQLFDRYWSHVENCSSCKKAHKYLNALEVILQIASVAMIGVMAVLKQTTMSNVARIAVLVAAVLSFAASKWLSHFIYKTFHYHDYNHAVV

SEQ ID NO: 19015 - protein, 455 aa, Prochlorococcus marinus subsp. pastoris str. CCMP1986
MSHEIFMPALSSTMTEGKIVEWLKNPGDKVERGESVLVVESDKADMDVESFQDGYLAAVLMPAGSTAPVGETIGLIVENQDEIASIQEQNKGKQTEVSSDGQLELPNNKPEIKEEKQKEVPQNNEQEVEIKREKVLITSNEIQFNASTSNNSSRVIASPRAKKLASTMGVELAKVHGSGPHGRIQADDVLKANGQPVSIPWIGEGSSPASISSPHVQAESKSETLGNSFGNPGETVQFNTLQKAVNKNMESSLNVPCFRVGYSINTDKLDNFYKKVKQNGVTMTALLVKAVAKTLKKHPQVNSSFSENGISYPENINIAVAVAMEDGGLITPVLKEPCNTDLFELSREWKDLVKRSRAKQLEPDEYSTGTFTLSNLGMFGVDRFDAILPPGTGAILAIASSKPTVVANNDGSISVKKIMQVNLTADHRVIYGADGASFLKDLSSLIENEPETLVA

SEQ ID NO: 19016 - protein, 387 aa, Prochlorococcus marinus subsp. pastoris str. CCMP1986
MGNKKNIIKKPGVKTLSIHHGETFSEETGCVMPPIFSTSTFKHGNKGNFDYTRSGNPNFKILENILKSIEESKYCTIFGSGISAVTAITSSLKSGDKILCESNLYGCTVRMFDKIFKKFGIQVLYTDLANKENLKKIKDFQPTLIWLESPTNPLLKVLDIKLICDEANKYKIPVVLDNTFSTALIQKPLELGATLSLISTTKFINGHSDALGGAVLTNNEEWNSKMLFSQKALGLQPSPFDTWLITRGVKTLPLRIEQQTKSAEIISKEIANHRIISKVFYPFNQKHPQFNLAKSQMKSGGSMITLKLNLNKSDTFKFCKSLRYFSLAESLGGVESLICHPATMTHASVDDKTKNLLGIDDSLIRLSVGCEDTNDLISDILFALNRF

SEQ ID NO: 19017 - protein, 499 aa, Rhodospirillum rubrum
MTQAAPPIDWTARARALRLPNHALIDGAPASAGDGATFDCVSPIDGRVLTRVAACGAADVDRAVAAGRAAFEDRRWCGLSPAARKKILLAFAERIEAHRDELALLETLDMGKPIADSLAVDVPATARCLRWYAEALDKVYGEVAPTGDDVLATITREPLGVVGVVVPWNFPMIMAAWKIAPALAAGNSVVLKPAEQSPLTAIRLGELALEAGLPAGVLNVVPGLGPVTGRAIGLHPDIDGAFFTGSTAVGKLFLSYSSQSNMKRLGLECGGKSAHIVLASCKNTTAAAQAAASAIFFNQGEMCTAGSRLIVERAIADEVIEKVVAEAAFWRPGPPLDPATRMGALVDAEQTERVLGYIALGQDEGARLATGGSRAMAESGGCYVEPTIFTGVAPTMRIAREEIFGPVLSVITVESADEAVRVANDSDYGLAAAVWSDDVTTLHRVAKRLRAGMVYANCYDADDITVPFGGFKQSGIGRDKSLHAIDKYTELKTTWLRLG

SEQ ID NO: 19018 - protein, 398 aa, Rhodococcus erythropolis
MALGTGPLTTTDASTQSGAGEEIREIEAAAPPARFARGWHCLGLSNTYRDGQPHQIEAFGTSLVVFADSKGDIKILDAYCRHMGGNLAHGTVKGDSIACPFHDWRWGGNGKCTAIPYARRVPPLAKTRAWTTLEKNGQLFVWHDPQGNPPPAEVTIPDIEGFGSDEWSDWSWNTLTIEGSHCREIVDNVVDMAHFFYVHYSFPKYFKNIFEGHVASQYMESVGREDIISGTNYGDPNAVLRSDASYFGPSYMIDWIKSEANGQIIETVLINCHYPISNNAFVLQYGAMVKKLPGMDDESTAAMAAQFTEGVEMGFLQDVEIWKNKAPIDNPLLSEEDGPVYQLRRWYNQFYTDVENVTEDMTKRFEFEIDTTRAVESWKREVAENVAARDAQALETTS

SEQ ID NO: 19019 - protein, 357 aa, Oryza sativa (japonica cultivar-group)
MSRTLVQPVGQKRLTNVAVVRLRKHGQRFEIACFPNKVLSWRTRVEKDIDEVLQSHTVYSNVSKGVLAKSKDLLKAFSTDDHTAICLEILDKGELQVSGKEREAQLSSQFHEIATIVMDKTINPETRRPYTITMIERLMHDVHFAVDPNLTSKEQALKVIKKLTEHFPIKRAPLRVRFTAPKSKFASLTEKLEEWNANVISKDESGSQPSVVCEIEPSILRSCEERLKDVQGRVEVLSVSAHAEGGSSVDQYENTEESQSVPAVEIDPVARIGEAMQKQSISSEPENPGQGQGKQQRRCKECDVLVEDKLYREHCKSGWHKHNYTRHKNGLPPLSQEECLVEMELADSKRDLKDYDF

SEQ ID NO: 19020 - protein, 540 aa, Oryza sativa
  unsure (1)..(540): unsure at all Xaa locations
MGLPGAEPPAASGGGLPGFFGGKSKYVRMDDVLPQEQEEDGVGGGGGGVRVRRSHSSRRYVFACSVFASLNSVLLGYDVGVMSGCILFIQRDLHINEVQQEVLVGCLSFISLLGSLAGGRTSDAVGRKWTIGLAAIVFQAGAAVMTLAPSFEVLMVGRLLAGVGIGFGVMIAPVYIAEISPAASRGSFTSFPEIFINLGILLGYISNYAFSGLPDHVSWRVMLAVGILPSVSIAFALLVIPESPRWLVMKNRADEAREVLLKVTDSEDEAKERLAEIERAAAAVASAGKYGDKTVWQELTRPSPVIRRMLITGLGIQCFQQITGIDALVYYSPTIFRDAGITTESQLLVATVAVGFFKTAFIALAIVLIDRVGRKPLLYVSTVGMTACLVVLAATLAALAHGSASRSAGIAVAILTVCGDVAFFSVGIGPICWVMSSEIFPLRLRSQAAALGAVMNRVTSGAVAMSFLSVCRAISVAGAFSVFAVISALSVVFVYRYVPETSGKTLEEIELLFGGGGGXDGEAARGEVELGDGEHLVHKG

SEQ ID NO: 19021 - protein, 161 aa, Oryza sativa
MAQESWKNESEETVHTPEAPILCVNNCGFFGSSMTNNMCSKCYRDFVKVTTMAAPVVEKKAFTPASSSKTPLEPAKPDEVPAAAVEDKQAAQEPPKPPSNRCLSCRKKVGLTGFQCRCGGTFCSTHRYTEAHDCTFDYKKAGRDQIAKQNPVVIAEKINKI

SEQ ID NO: 19022 - protein, 82 aa, Trichodesmium sp. WH 9601
MKTTKTACPYCGVGCGLEVSPPATPGKVTNRDSKGNPTWQVRGDRSHPSSQGKVCLKGATVGEALDKSRLKYPMMRNTLDEA

SEQ ID NO: 19023 - protein, 240 aa, Archaeoglobus fulgidus
  unsure (1)..(240): unsure at all Xaa locations
XHHHHHHVSLDKAVIARLRKGGEEFEVLVDPYLARDLKEGKEVNFEDLLAAEEVFKDAKKGERASVDELRKIFGTDDVFEIARKIILEGEVQITAEQRREXLEAKRKQIINFISRNTIDPRTNAPHPPSRIERALEEAKVHIDIFKSVEAQVKDIVKALKPILPLKFEEXEIAIKIPPEHTGRAISALYNFGGVTREEWQRDGSWICVXRIPSGXYGDLXDLLGKVAKGEALTKVLRRIG

SEQ ID NO: 19024 - protein, 199 aa, Fusobacterium nucleatum subsp. nucleatum ATCC 25586
MGNLKNHLMKYERRPIMKIYDFKVKNRKGEDISLENYKGKVLLIVNTATRCGFTPQYDELEALYSKYNKDGFEVLDFPCNQFGNQAPESNEEIHTFCQLNYKVKFDQFAKVEVNGENAIPLFKYLKEEKGFAGFDSKHKLTSVLTEMLSKNDPDFAKKSDIKWNFTKFLVDKSGNVVARFEPTTSAEVIEQEIKKLLEV

SEQ ID NO: 19025 - protein, 567 aa, Magnaporthe grisea 70-15
MAFRFVAHRIPANLALRSGSPIRFYSQAAAAFAAKANETQQASKLSNPDPAEDSASAALVREHAPFMVATYSRPSPVFVRAKGSYLWDMEERRYLDFTAGIAVTGLGHCDPQVSDILAEQGSTLMHTSNLYYNPWTLALSKALVEKTVASGGMHDAKSVFVCNSGSEANEAAIKFARKVGKVVDPSGNKTEIVSFANAFHGRTMGSLSATHNPKYQEPFAPMVPGFKCGTYNDIAAIPDLVTEKTCGVIVEPIQGEGGVQVATDDFMVALAKRCREVGALLIHDEIQCGMARTGSLWAHGRLPKEAHPDMVTTAKALGNGFPIGAIIVNGHVTEKIKVGDHGTTYGGNPLACRLAHHVLERLSNPKLHESVMGKGAVLARGLAQLRQKHSELISEIRGRGLILGLQLTQDPAPIVAAARERGLLIITAGHNTISNAARKKAGDARAGEVALVPAERAVGNTAWEVRWPWAAPTAVEYLEQRSLTAGAPVGFYENQEGRQGQNSSRCLAGTINPSWLPSSHRDRISRWAAYDRYASILAEELAVRRVGRYASGDYVKAEVKTLTQKRY

SEQ ID NO: 19026 - protein, 304 aa, Moorella thermoacetica ATCC 39073
MNAAIRAVVRQAAALKIDVIGISRGYAGLIQGDFRRLNTGSVAGIIHRGGTILLTARSEEFRTEAGRATALDNLHREGIEGLVVIGGDGSFHGAVHLAKKGLPVIGIPGTIDNDIAGTDYTIGFDTAVNTAVEAISRIRDTATSHERIFIIEVMGRRSGQIALAAGIAGGAESILIPEYPVNYDRVVEKLEQGRHRGKLHSIIVVAEGVGSALEVSEEIARRTRLESRVTILGHIQRGGAPTAFDCMLASRLGARAVDLLADGASSRMVGIAANELVDRDLETVLREKKSIDPELYRLAEVLAL

SEQ ID NO: 19027 - protein, 431 aa, Methylococcus capsulatus str. Bath
MKFPVAMMRVLALSGLTWPVLAAPEGPNAADTAWILTSTGLVLFMTMPGLALLYAGLVRTKNVLSVMVQIFTATSLVSVLWVIAGYTLALTDGGELQAWIGGGKRLFLLGLKADSLNGNLPEVVYCMYHLTFAIFAPALMLGAIVERMKFSVTLWFTGIWTLLVYVPVCHWVWGEGWLARIGAIDFAGGVVVHTTAGVSALVGAWMLGPRRGYPRTLLPPHNLTLTAIGAGILAVGWHGFSAGSALMATGAAGMAMLTTHIGASVGALVWMAVEWRSFGKPTLLGALTGMIAGLGVISPAAGFVGPLGAIAMGTAAGVICFGAIHWIKRSLQIDDTLDVFPVHGVGGMIGTVLTAPFAAEALGGAGITTGLTIGQQTLTQILAVGSVAAWSGLISWLLLKILDRTIGLRVTPDQETEGLDVALHNSKAYHF

SEQ ID NO: 19028 - protein, 234 aa, Listeria monocytogenes EGD-e
MSAYLAEFIGTMVLIMFGNGLLAGLTLNKSLSQGANWVVVTFGWGFAVMIGIYVAGAYSGAHLNPAVTIALAVGGSFPWADVVPYIIAQIAGAFVGASIVILHYYPHFKATPPEIDTHGIFSTGPAIRNTPFNLISEIIATFAFIFGLLMIGANSFTDGLNPLILGFLVVAIGMSFGPTTGYAINPARDLGPRLAYFLLPVPNKSGSDWRYAWIPIVGPIIGGLLAIGLFNILL

SEQ ID NO: 19029 - protein, 338 aa, Morganella morganii
MIMKALVLEKAGKIAIQDWQSNEVLGDDDVEIKIHTVGICGSDVHYYQHGRIGPFVVDEPMVLGHEASGVITAAGKNVKHLKVGDRVCMEPGIPDLQSPQSRAGIYNLDPAVRFWATPPIDGCLRESVIHPAAFTFKLPDNVSFAQGAMVEPLAIGMQSATKAGIKPGDIGLVIGAGTIGIITQSALAGGCSDVIICDVFDEKLKVAEKYQGLHAVNSKDQQALADKVRELTGGEGVNVLFECSGAKPVIASISDHIAPGGTAVLVGMPIDPAPLDIVAAQAKEVTFKTILRYANMYPRTIRLLSSGKLNVAPLLSATYKFKDSVEAYERAAEPVRLM

SEQ ID NO: 19030 - protein, 472 aa, Nostoc punctiforme PCC 73102
MEVDTQHYDDIIIGGGKAGKTLAPALVADGRKTALVERSLNMIGGGCINIACIPTKTMVASANVANTVRNSAAYGVKANTPIVDLAEVIQRKRAVVQSAREMNLHNLETALDKNLIIGEARFVAPKTIEVTTTEGKNRLLTAERLFINTGTRPLIPSIPGLTEVEFLTSESIMELEYLPEHLIVLGSGYIGLEFAQMFRRFGCGVTVIGQSEQILSQQDPDIAIAVQTLLERNGIEFLLKAKVLRVVRKASPLENRTGNETILQIQVGDREITLQGSHLLVAVGRAPNTDSLNLAAAGVATDTRGFIQVNDRLETNIPGIWALGDINGGPQYTHISLDDYRIIKANLIDGGDRSTGDRLVPSCLFIAPELAHVGLTETEAQQQGYAIRVAKIDASAVPRARTLGQTDGLLKAIMDTETGRILGCSLLCHEAGEVISTVQMVMQAQMPYTILRDGILTHPTMTEGLNILFSKL

SEQ ID NO: 19031 - protein, 161 aa, Pseudomonas aeruginosa UCBPP-PA14
MSDSLLSIPCTTIKGEQKTLADFGGKALLVVNTASKCGFTPQYQGLEALWEKYRERGLVVLGFPCNQFGKQEPGDEGEISQFCELNYGVSFPLFRKIEVNGAGAHPLFVSLKKRALGLLGSQGIKWNFTKFLIGRDGQVVKRYAPTTKPEELSSAIEALLE

SEQ ID NO: 19032 - protein, 246 aa, Cucumis sativus
MGRGRVELKRIENKINRQVTFAKRRNGLLKKAYELSVLCDAEVALIIFSNRGKLYEFCSTSNMLKTLERYQKCSYGAVEVTKPAKELESSYREYLKLKSRFESLQRTQRNLLGEDLGPLNSKELEQLERQLVSSLKQVRSTKTQYMLDQLSDLQNKEQMLIETNRALQIKLEEISSRNNIRLTWDGGDQSMSYGPQNAQTQGFFQPLECNPTLQIGYTSAVSDQITSTTTPTHAQQVNGFLPGWML

SEQ ID NO: 19033 - protein, 304 aa, Oenococcus oeni PSU-1
MKAIEINEFGDVDVFYATEKKLADPKPNQVLVKNFATAIDPYDVKYRSGFYGGSDKLPTVLGSSVAGIVQEIGSEVTKYSVGDRVVASTHLRSYAEQVLVSEKQLALIPDNLTFVQAAGVALGYQTGYQAIIKEIKLKKGQSILIHGGSGAVGFAAIQAAEKIGAGKIYTTAGTKGKAFLNGFNPAIAVYDYKKENFTNISEKIDAILDTVGGETQDKSLKLLKENGKLCSTVGLTDKAKKSPFDTDAIYLDSGSCLTELLKDMSQGLTVLKIAKISQFSLKNLRSMHKEFENDHPLGKLILEL

SEQ ID NO: 19034 - protein, 362 aa, Oryza sativa
GGFPLLFCAVICLMAQQGACNVVLIANNTTLSFDDVEATFTPEVKDSGVNGAIYAVEPLDACSPLRKKAANGPVSPFALVIRGGCQFDDKVRNAQNAGFKAVIVYDDEDSGVLVSTSGEVLKKYSGQSDVEVWILPVYENSAWSIMAISFTSLLAMAAVLATCFFVRRHQIRRDRGRIPVTREFHGMSSQLVKAMPSLIFTKVQEDNSTSSSCAICLEDYSFGEKLRVLPCRHKFHATCVDMWLTSWKTFCPVCKRDASAGTSKPPASESTPLLSSVIHLSAESTALSSFRSTVAVSPPRPIRRHPSSQSTSRAYYTNSPYISTSRSNVDLANMSSQWSRCLPKYYFYFFYRNIFAQYYFNT

SEQ ID NO: 19035 - protein, 753 aa, Escherichia coli CFT073
MSQHNEKNPHQHQSPLHDSSEAKPGMDSLAPEDGSHRPAAEPTPPGAQPTAPGSLKAPDTRNEKLNSLEDVRKGSENYALTTNQGVRIADDQNSLRAGSRGPTLLEDFILREKITHFDHERIPERIVHARGSAAHGYFQPYKSLSDITKADFLSDTNKITPVFVRFSTVQGGAGSADTVRDIRGFATKFYTEEGIFDLVGNNTPIFFIQDAHKFPDFVHAVKPEPHWAIPQGQSAHDTFWDYVSLQPETLHNVMWAMSDRGIPRSYRTMEGFGIHTFRLINAEGKATFVRFHWKPLAGKASLVWDEAQKLTGRDPDFHRRELWEAIEAGDFPEYELGFQLIPEEDEFKFDFDLLDPTKLIPEELVPVQRVGKMVLNRNPDNFFAENEQVAFHPGHIVPGLDFTNDPLLQGRLFSYTDTQISRLGGPNFHEIPINRPTCPYHNFQRDGMHRMGIDTNPANYEPNSINDNWPRETPPGPKRGGFESYQERVEGNKVRERSPSFGEYYSHPRLFWLSQTPFEQHHIVDGFSFELSKVVRPYIRERVVDQLAHIDLTLAQAVAKNLGIELTDDQLNITPPPDVNGLKKDPSLSLYAIPDGDVKGRVVAILLNDEVRSADLLAILKALKAKGVHAKLLYSRMGEVTADDGTVLPIAATFAGAPSLTVDAVIVPCGNIADIANNGDANYYLMEAYKHLKPIALAGDARKFKATIKVADQGEEGIAEADSADGSFMDELLTLMTAHRVWSRIPKIDKIPA

SEQ ID NO: 19036 - protein, 139 aa, Triticum aestivum
  unsure (1)..(139): unsure at all Xaa locations
VNVVTEVWAVKDKIKQFXKTSKIGQWFGAPGKPLQMVAQFGIGGTSLGLRFVQTVPKTDQKAXKCAKRRQLRFSCNVDPVDGARGIQDLDPATTLVVVVSKNFTTAETMLNARTIKEWIVSALGPQAXSKHMIAVSTNL

SEQ ID NO: 19037 - protein, 1322 aa, ASPERGILLUS NIDULANS FGSC A4
MVSRSNEGPEAPHPASRTPGAPAKGRLTRLGSSPSKRDDKAKDDRMGKTSAKDVAELKDYIKLADLPKSELRVIMLEIDLLKNLDHPNIVKYQGFVKSAETLNIILEYCENGSLHSIAKNFGRFPETLVGVYMSQVLHGLLYLHDQGVIHRDIKGANILTTKEGLVKLADFGVASRTTGLSESSVVGTPYWMAPEVIELSGATTASDIWSLGCTVIELLEGKPPYYNLQPMPALFRIVNDDHPPLPQGASPAVKDFLMQCFQKDPNLRVSARKLLKHPWIVNARRSDSVVPKKSTEYEEAVKSVQEWNEALRSPESNALRRGTRNENQNPPSLRLDTRHTPTKVTLPSPVSRIVADKFSSPSSGEEDNWDDDFATAISPSALQLPHLRPHDNFGGMLSSEKLKAFASLDGTVLKSDESFEESDDPFKGSLLAGEHDPLKTIRPPPSQQANSGTSQSQNGPYGAHMRRGPPLNTAITPVYGGQMLQNSSSPIRQQRPPLFYKENSVEDYSDLISANEDVLDRKISAFQESDEHKDLADTGRSREVIRYQSSYEQEDTPRIGRQISVKRYRGTVEIQQFAENEHDEDFSDILGVDGVTLDKAESDDGSNKSTLMLNTKLSNNSWLGDLDDEDDPFALLEEGLDETDLEANIARDKHARLRSQVEGLVGSLKTSQDEEVLGDISEQLLAVFCDFPETKNIIISAHGMLPILEILDLCRRRDITLCLLKIVNAIIYDDYEIQENLCFVGGIPIINEFAAKKYPREIRLEAAAFVQQMYQTSTLTLQMFVSAGGLNVLVEFLEDDYEDERDLVLVGVNGIWSVFELQGSTPKNDFCRILSRSSVLDPLSLVLSRVLDEEGELAEVVEGRIANIFFIFSQAENHVKEMVSERTVLHSTDDGLGVLKELKRMTPAHQITMLKFIKNLSMLSTTLDSLQNSNAIDVLTDLLRSTIKRPHFREVSNQILNTIYNMCRLNKSRQEDAALNGIVPLLQKIVKTERPLKEFALPILCDMAHSGKVGRRELWRNKGLAFYISLLSDPYWQVTALDAIFIWLQEETAKVEEHLLENRYDQPSFTDAIVRCLTLSKANAFENILEPLQKLLRLSPPIASTLARPDLFSRLGQKLHHSKAAVRLNLLRIISSICDSSEQQGGLLASYGLLDSIRELEHDPAILVRDMAGKLIQSSERNDSYGLCKLKPNVRRGSTSATSPGLLANQSAPVTPQLSRQNQSKGYYDSRETQRRPRSAISGSALALRPGSRDGPTPGIVGGANGSAGASRNRIARGVSNRLSHIELLPNDDDRIPSSITRRSSVLPRRRRLTQFEAERGS

SEQ ID NO: 19038 - protein, 252 aa, Triticum aestivum
  unsure (1)..(252): unsure at all Xaa locations
MASANALLLLFSAAFCLLARRAAGDYGSWQSAHATFYGGGDASGTMGGACGYGNLYSTGYGTNTAALSTALFNDGAACGSCYELKCQDVSSSCLPGSITIXTATNLCPPNYALPNDDGGWCNPPRAHFDMAEPAYLQIGIYRAGIVAVAYRRVPCVKKGGIRFTINGHSYFNLVLVTNVAGAGDARSVSIKGTRTGWQAMSRNWGMNWQSNTFLDGQCLSFRVTSSDGRTVTSNAAAPAGWHFGQTFEGAQF

SEQ ID NO: 19039 - protein, 110 aa, Glycine max
  unsure (1)..(110): unsure at all Xaa locations
KIYCPNVSTVNHAGAGMVAPFTGLKSMADFPTRXTNNDITSIASNGGRVQCMHVWPPDGKNKVDTLPYLPDLDDAQLANEGXYLHTKGWIPSLEYELEHGNVYPEHNMSP

SEQ ID NO: 19040 - protein, 391 aa, ASPERGILLUS NIDULANS FGSC A4
MALRRSTRLSALIPLKSTAQAATSASQRSNGITKTRKLSTKEKKKKTWTTENLNSHAQSVIDSDPNPTEQTPTTVPPLPPSSAVDSNTHNSNYWDSTPISNSRLHTPPPLDRPVEPHRTNATLLTPHGSSLVAYPPGATGSDISPSKPGLPRPTATTGTLLEKATAHLIATDPRLEPLIKAHHCSLFSPEGLAEKIDPFRSLVGTIIGQQVSGAAARSIREKFVALLWGLNHTYENGDEVQRDREDENEGYFPTPEEIVRVDIPTLRTAGLSQRKAEYIHGLAEKFASGELSATMLLNASDEELLEKLTAVRGLGRWSVEMFACFTLKRTDVFSTGDLGVQRGCAAFMGKDFKYMSEKEMLDLAAKFAPYRSLFMWYMWRVEEVDVTVLSG

SEQ ID NO: 19041 - protein, 274 aa, Rhodospirillum rubrum
MHRVSANGIAIPALGFGTWQIEGDDARVAVAEALALGYRHIDTARAYGNEAQVGAGIAQSGVPRGDIFLTTKIWTSEFKPEALTAALADSLAKLGTDYVDLTLLHWPNPEVPLADSLGALAALQQEGLTLAIGVSNFPVALVEEAVAVCGRPLAVNQVEYHPFLDQSKVIEACRRHGMAVEAYSPLARGKVMEDATLRRIAEIYGRTPGQVALRWLIQQDGVIALPKAVRPEHAKANLGALDFALSQSEMAEISALARPDGRLINPSWAPAWDD

SEQ ID NO: 19042 - protein, 296 aa, Xylella fastidiosa Dixon
MIKRIRKAVFPVAGLGTRFLPATKTIPKEMLPIIDKPLIQYAVDEAIQAGCDTLVFVTNRYKHAVADYFDKAYELEQKLERAGKYEQLELVRHVLPDGVRTVFVTQTEALGLGHAVLCAKPVVGDEPFAVLLPDDLMWSRNGGALKQMADVAEVSGSSVIAVEDVPVDKTVNYGIVGTDVFDGSKGRITQIVEKPKPDDAPSNLAVVGRYVLSGKIFEMLENTSIGTGGEIQLTDAIAELLKYERVDAYRFQGRRFDCGAHIGLIEATLHLALEHKKHGQAVREILRDTLLTVDKR

SEQ ID NO: 19043 - protein, 593 aa, Synechocystis sp. WH 8501
MTGFDRVMLYKFDEDDHGEVIAEDKLAELEPYLGLHYPASDIPLPARRLFSSNYIRLIPDAKATGIDLFSKLHPLNDTALDLTHSILRSASPCHLEYLHNMGVGASLTISLIDDRKLWGLIACHHLTPKYVPYELRKACEFLGQVVFSEISAKEETKDYDYRMKLTRIQGALIESMSQADNFIEGLINSNQNLLDLTSSQGVAVCVGEEYNLIGNTPKEEEVKYLLQWLKKNIDEEVFSTPSLPHLYADARNFKNVASGLLAIKISHRNYILWFRPEVIQTVNWGGDPSKAYEMQKIDGNLRLCPRKSFELWKETVRLTSLSWKPIEIKAALGLKEAIVNIILRQADELAELAHDLELSNAELKKFAYVASHDLQEPLNQVSNYVQLLEMRYDEALDEDGKEFINFAVEGVSLMQTLIDDVLAYSKVDIRDIKFDLTESENALEKAIANLRGRIAETNAIITHDPLPTVMANSTQLIQLFLNLISNAIKFRSEATPEIHIQAQRLEDEWLFSVEDNGIGIDPRFSDRIFIIFQRLHTRDEYPGTGMGLAICKKIMECHRGKIWVESEIGQGATFYFTIPVGGTERDRKRGSTR

SEQ ID NO: 19044 - protein, 570 aa, Glycine max
  unsure (1)..(570): unsure at all Xaa locations
FQVASSTLICDTXEWKELKAHAEDVEKTHLRDLLSDDERSQSMVVEFDGILLDYSRQQATLETREKLFKLAEVASLKQKINQMYNGEYINSTENRSVLHVALRAPRDAVIQSDGNNVVPDVWNVLDKIQEFSERIRSGSWVGATGKALKDVVAVGIGGSFLGPLFVHTALQTDPEAIESARGRQLRFLANVDPIDVARNITGLNPETTLVVIVSKTFTTAETMMNALTFREWVXNALGPLAVAKHMVAVSTNLTLVEKFGIDPNNAFAFWDWVGRXYSVCSAVGVLPLSLQYGFSVIEKFLKGASSIDQHMYSEPFERNLPVLLGMLSVWNVSFLGYPARAILPYSQALEKFAPHIQQVSMESNGKGVSIDGVPLPFEAGEIDFGEPGTNGQHSFYLLIHQCRVIPYDFIGVVKSQXPVYLSGEVVSNHDELMSNYFAQSDALAYGKTAEQLQKENVSPHLVPHKTFSGNRPSLSLLLPSLNAYNIGQLLAIYEHRVAVEGFIWGINSFDQWGVELGKSLASQVRKQLNASRTKGEPVQGFNFSTTAMLTRYLQASADVPADLPTRLPQI

SEQ ID NO: 19045 - protein, 176 aa, Glycine max
  unsure (1)..(176): unsure at all Xaa locations
YCENLWSEDQISRRVFELAAEISDDFGGHSPAPVVVGVATGAFLFLADLVRKIDLSIAVDFVRVESYGSGTVSNGAPTISFDLKVDVNSRHVIXDTGHTLSKVIEHLKSKGASSVSVCTFLDKPARRKVHFQLVGEGKYYRGFECPNYFVVGYGLDFAELYRNLPYIGVLKPELYK

SEQ ID NO: 19046 - protein, 440 aa, Candida albicans
MPSHFDTLQLHAGQPVEKPHQPRAPPIYATTSYVFNDSKHGAQLFGLETPGYIYSRIMNPTNDVFEQRIAALEGGIGALATSSGQSAQFLAIAGLAHAGDNIISTSYLYGGTYNQFKVAFKRLGIETKFVNGDAAEDFAKLIDDKTKAIYIETIGNPKYNVPDFEKITKLAHEHGIPVVVDNTFGAGGFLVNPIAHGADIVVHSATKWIGGHGTTIAGVIVDSGNFPWTEYPEKYPQFSKPSEGYHGLILNDALGKAAYIGHLRIELLRDLGPALNPFGSFLLLQGLETLSLRVERQSENALKLAQWLEKNPNVESVSYLGLPSHESHELSKKYLNNDAKYFGGALAFTVKDITNTSSDPFNEASPKLVDNLEIASNLANVGDSKTLVIAPWFTTHQQLSDEEKLASGVTKGLIRVSTGTEYIDDIINDFEQAFKKVYNN

SEQ ID NO: 19047 - protein, 440 aa, Candida albicans
MPSHFDTLQLHAGQPVEKPHQPRAPPIYATTSYVFNDSKHGAQLFGLETPGYIYSRIMNPTNDVFEQRIAALEGGIGALATSSGQSAQFLAIAGLAHAGDNIISTSYLYGGTYNQFKVAFKRLGIETKFVNGDAAEDFAKLIDDKTKAIYIETIGNPKYNVPDFEKITKLAHEHGIPVVVDNTFGAGGFLVNPIAHGADIVVHSATKWIGGHGTTIAGVIVDSGNFPWTEYPEKYPQFSKPSEGYHGLVLNDALGKAAYIGHLRIELLRDLGPALNPFGSFLLLQGLETLSLRVERQSENALKLAQWLEKNPNVESVSYLGLPSHESHELSKKYLNNDAKYFGGALAFTVKDITNTSSDPFNEASPKLVDNLEIASNLANVGDSKTLVIAPWFTTHQQLSDEEKLASGVTKGLIRVSTGTEYIDDIINDFEQAFKKVYNN

SEQ ID NO: 19048 - protein, 500 aa, Brucella melitensis 16M
MPYCPIALHKETTMKAQPKASHFIGGAFVEDKAGKPLPVIYPATGEEIASLYSATPGIIEAAYAAALKAQGEWAALKPVERGRILRRTAEILREKNRKLSKLETLDTGKALQETLVADAASAADALEFFGGIISGFNGEFVELGGSFAYTRREALGICVGIGAWNYPIQIAAWKSAPALAMGNAFIFKPSENTPLSALALAEAYKEAGLPDGLFNVVQGYGDVGAALVNHRLTAKVSLTGSVPTGRRIMAQAGEQLKHVTMELGGKSPLIVFDDADLESAIGGAMLGNFYSTGQVCSNGTRVFVHKNIRERFIERLVERTRKIRIGDPFDEATQMGPLISAAQRDKVLSYIKKGKAEGATLACGGGVPKLQGFDKGFFIEPTVFADVTDTMTIAREEIFGPVMSVLEFSDEDEVIARANDSEFGLAAGVFTADLSRGHHVIGQIKAGTCWINAYNLTPVEVPFGGYKQSGIGRENGIAALAHYSQIKTVYVEMGKVDSPY

SEQ ID NO: 19049 - protein, 326 aa, Aquifex aeolicus VF5
MDATLIIGLLSKDMGKLAYVFPGQGSQYVGMGYEFYKQFHETADVVHAVEHSLRMSLDDIVDVMFKGPEEKLNKTVYTQPALFAISLGIYKALESMGFPKPDFVAGHSLGEYTALAVAGGIDVQLGARLTYYRGKYMQEAVPEGKGAMVAILKLPPEKVEEACERAKDVGVVEPANYNSSTQTVISGEKPAVEKAAQIAKEMGGRAIPLKVSVPSHCSLMKPAADAFRLKLAQAPIQNIKIPLVQNYTAKAHTMAHEIRNNLYHQIFSPVKWYQSVIWMHEQGVDTFVEIGPKNVLSKLIQQTLPNVRVFNVEKPEDAESVLKAIT

SEQ ID NO: 19050 - protein, 552 aa, Leptospira interrogans serovar lai str. 56601
MNPNMKLSKKYTFRSRKVLLIILDGVGYSPKGPESGNAIAGAKLPFLNRVWNQFPTLHIQAHGKAVGMPSDDDMGNSEVGHNVLGSGRIFDQGAKLVSNSIASGDIFNGQAWKEVIGNSKKNNSTLHLLGLFSDGNVHSHIDHTKALISQAILEKVPKIRLHILLDGRDVPEKSALDYLNPFETWLDSLRKSGTDIRIASGGGRMTITMDRYEADWSMVERGWKVHVKGEGRYFSSAKEAIETFRSENPKIIDQYLPSFVISDNGKPVGKIQDGDSVVFTNFRGDRAIEISLAFTEKNFDKFDRGPLPNVLYAGIMQYDGDLKLPERFLVAPPAIDRTLGEYMASSNIPQYALSETQKYGHVTYFWNGNKSGYFDQNSEEYREILSDVIPFDQSPEMKALLITEALEKALNENKQDFYRVNYANGDMVGHTGNYLATVQAMEFLDGCVERLWKTCEKQNIVLLVTADHGNADEMFQLDKKGNVEKDSHGNPIPKTSHTLNPVPISILDPENKIRFNSKLSNPGLANVAATILDVMGYETPEGYHPSLIQNES

SEQ ID NO: 19051 - protein, 318 aa, Glycine max
MNFNCTANKEQKKTVDQSILLCCKFFVSESRNNATLNAIERAARSNPETVIVNMFHDRTYNRARYDLVSYVLHDCTGNPIYSPLHQTVIAMAEATFNAINLEFHEGAHPRLGAVDDIVFHPLGHASLDEAAWLAKAVAADIGNRFSVPVFLYAAAHPTGKELDAIRRELGYYRPNSRGSQWAGWAMPETLPLSPDEGPNVVSRAKGITMIGARPWVTLYNVPILCTDVSVARRIARKVSARGGGLPTVQTIALVHEDSTEIACMLLDSKQVGADRVQNRVEMLAAQEGLDIEQGYFTDISPEMIVEKYMKLINSANKS

SEQ ID NO: 19052 - protein, 237 aa, Bacillus cereus ATCC 14579
MQQSKEERVHDVFEKISDKYDVMNSVISFQRHKAWRKETMRIMDVQPGSQALDVCCGTADWTIALAGAVGEQGKVVGLDFSENMLSVGKQKVEALQLKQVELLHGNAMELPFEDNTFDYVTIGFGLRNVPDYMHVLKEMTRVVKPGGKVICLETSQPTMIGFRQGYILYFKYIMPLFGKMFAKSYKEYSWLQESASTFPGMKELAQMFEQAGLERVQVKPFTFGVAAMHLGIKPESK

SEQ ID NO: 19053 - protein, 411 aa, Glycine max
MEMDPPPKSWSIHTRSEIIAKYEVMERVGSGAYADVYRGRRLSDGLTVALKEIHDYQSAFREIDALQLLEGSPNVVVLHEYFWREDEDAVLVLEFLRTDLATVIADTAKANQPLPAGELKCWMIQILSGLDACHRHMVLHRDLKPSNLLISEHGLLKIADFGQARILMEPGIDASNNHEEYSRVLDDIDNKDTITSTHDGNATCNTSDVDREEEELGCFTSCVGTRWFRAPELLYGSRNYGLEVDLWSLGCIFAELLTLQPLFPGTADIDQLSRIIGVLGNLDENAWAACSKLPDYGIISFSKVENPAGLEACLPNRSPDEVALVKKLVCYDPAKRATAMELLHDKYFSDEPLPVLVSELRVPLTRKEQDGDSPGGWGDINDMDSDSDSQFDEFGPLNITRTGTGFSIQFP

SEQ ID NO: 19054 - protein, 205 aa, Lactobacillus johnsonii NCC 533
MASLQTLSDVMVTGYHASLNCEVKPGYTVAVIGDGAVSLAGVIGAKLLGTEKIILLSHHDDRAQLGREFGATDTVSSRYEEAVKDVLALTKENSGADAVLECVGAESAIEQADQIARPGAVIGRVGVPHAEPKSNQLFWKNVGLRGGIASTTKPDKEVLLQVVLDGKINPGKVFTKSFDLDHIQDAYEAMSNRDAIKSLIIVNNK

SEQ ID NO: 19055 - protein, 404 aa, Escherichia coli
GKKITLQNGKLNVPENPIIPYIEGDGIGVDVTPAMLKVVDAAVEKAYKGERKISWMEIYTGEKSTQVYGQDVWLPAETLDLIREYRVAIKGPLTTPVGGGIRSLNVALRQELDLYICLRPVRYYQGTPSPVKHPELTDMVIFRENSEDIYAGIEWKADSADAEKVIKFLREEMGVKKIRFPEHCGIGIKPCSEEGTKRLVRAAIEYAIANDRDSVTLVHKGNIMKFTEGAFKDWGYELAREEFGGELIDGGPWLKVKNPNTGKEIVIKDVIADAFLQQILLRPAEYDVIACMNLNGDYISDALAAQVGGIGIAPGANIGDECALFEATHGTAPKYAGQDKVNPGSIILSAEMMLRHMGWTEAADLIVKGMEGAINAKTVTYDFERLMEGAKLLKCSEFGDAIIK

SEQ ID NO: 19056 - protein, 71 aa, Triticum aestivum
  unsure (1)..(71): unsure at all Xaa locations
MGKMPVRMKAVVYALSPFQQQVMPGXWKDXXXXIHXKVSEXWIXAKFFIXPVVXTTXXVXXKGAGKXFSQK

SEQ ID NO: 19057 - protein, 404 aa, Escherichia coli
GKKITLQNGKLNVPENPIIPYIEGDGIGVDVTPAMLKVVDAAVEKAYKGERKISWMEIYTGEKSTQVYGQDVWLPAETLDLIREYRVAIKGPLTTPVGGGIRSLNVALRQELDLYICLRPVRYYQGTPSPVKHPELTDMVIFRENSEDIYAGIEWKADSADAEKVIKFLREEMGVKKIRFPEHCGIGIKPCSEEGTKRLVRAAIEYAIANDRDSVTLVHKGNIMKFTEGAFKDWGYQLAREEFGGELIDGGPWLKVKNPNTGKEIVIKDVIADAFLQQILLRPAEYDVIACMNLNGDYISDALAAQVGGIGIAPGANIGDECALFEATHGTAPKYAGQDKVNPGSIILSAEMMLRHMGWTEAADLIVKGMEGAINAKTVTYDFERLMEGAKLLKCSEFGDAIIK

SEQ ID NO: 19058 - protein, 347 aa, Streptococcus agalactiae 2603V/R
MFVKKGLFVFLLLCILSMWLMIFGVAFYYFGSLHQSLTSRIIYQFVLTVLLTTTAWFMGAYFLAFEGHFKTVFQFQEADGKQIVNCLFQLCFALYAVVMLIGSIIDRVQTKRLLLAVVSWLFLVYTPLAYLIWNSEGVFAKMGVLDFSGGMIVHLSAGLSSYILAHVIGKSEHQHNKVKNDSLFLGMILITFGWFGFNMGPVGEWNSQAIMILLNTIFAIIGGGLAWTLAAKWNGEEEKTGSLLNGIIVGLVTSTAGVGYLLTWQLLAVTFFASLFTYFVTDYVAKAFAIDDVVSSFGMNGIGGLLGSLGVGLFKLSHMPVQLLALATTILLSIIMTYIISKAIFRK

SEQ ID NO: 19059 - protein, 511 aa, Cryptococcus neoformans var. grubii
MFARQPLSQNLLRPLSRPSSSFCRTSTIPKLAFLQSARGFASASEPYDVVIIGGGPGGYVAAIKAAQLGFKTACIEKRGALGGTCLNVGCIPSKAMLNNSHIFHQTQHDLKNRGIDVSDIQLNLPKMLAAKEASVKALTGGIETYLFKKNGIDYIKGEASFETANKLSVKLLEGGETQVEAKNVIIATGSEVTPFPGLEIDEERIVSSTGALELKEVPKKMVVIGGGVIGLELGSVWSRLGAEVTVVEYLGAIGAGMDGEVGKQFQKILTKQGFKFKLNTKVVSGHREGDIVKLKVDSAKGGREETIEADVVLVAIGRRPVTTGLNLEAIGVETDKRGRIIIDDEFNTSAKGVKCIGDVTFGPMLAHKAEEEGIAAVEILKTGHGHVNYDAIPSVVYTHPEVAWVGKNEEELKAAGVQYKIGKFPFAANSRAKTNQDSEGFVKFIVEKETDQVLGCHIIGPNAGEMIASATLALEYKASAEDIARTCHAHPTLSEAFKEAALASYDKTINF

SEQ ID NO: 19060 - protein, 540 aa, Oryza sativa
MGMRGVGLGFLVRWCLWLIGAEWKCYRWRIWGDLEELDLIATLMAVGETGGWSAISPGSGSGAGLGDPRISGSTYDLFWDGHCFKSKHTLFYIPATLVAFNQVPHFKKSICYYDRTDGGSLSADKWNGYVNKDDRALLKVINTLVNLRFFIMKVVFPKMLGETLAYMSMTRPRKEIYYEPAEVKAAIVTCGGLCPGLNDVIRQIVFTLEIYGVKNIVGIQFGYRGFFEKGLKEMPLSRKVVENINLSGGSFLGVSRGGAKTSEIVDSIQARRIDMLFVIGGNGSHAGANAIHEECRKRKLKVSVVAVPKTIDNDILFMDKTFGFDTAVEEAQRAINSAYIEARSAYHGIGLVKLMGRSSGFIAMQASLSSGQIDVCLIPEVSFTLDGEHGVMRHLEHLLEKKGFCVVCVAEGAGQDLLQKSNATDASGNVILSDFGVHMQQKIKSHFKDIGVPADVKYIDPTYMVRACRANASDAILCTVLGQNAVHGAFAGFSGITSGICNTHYAFLPITEVITKPKRVNPNSRMWHRCLTSTGQPDFH

SEQ ID NO: 19061 - protein, 278 aa, Candida albicans SC5314
MNHDPYSWGRPSNDTYGPYNYKIAHANNNQVEQTTHNFPKMNTQQPIITGTSVIASKFKNGVIMAADHVGSYGSLLRFNNIERLIKVGKETVVGISGDISDLQYIVRLLDELEIDEEVYDNDGGEYLRAPNVHEYLSRVLYNRRSKMNPLWNAIIVGGFNKDRTPFLKYVDLLGVTYHASTMATGFGSHLAIPLLRNLIPEDKDYVKVDEQQVSKAVEDSMRVLFYRDARSGENYSVVIIKLDENTGELSFQFIKDAKVQNQSWKFAGDIRGYGSSQQ

SEQ ID NO: 19062 - protein, 571 aa, ASPERGILLUS NIDULANS FGSC A4
MCGIFACHHHPDVQAFKPTALRMAKAVRHRGPDWSGSFIADKTILCHERLCIVGVDSGAQPLVNDDESLALAVNGEIYNHRIVRKTLDVEYNYKTHSDCEVIIPLYMKYGLDAPKHLDGMFAWVLYDKKEDRVIAARDPIGICSFYIGWSSQTPGAVYFASELKSLHPVCDKVEAFPPGHVFDSKSGEFSRYFQPSWWDPTNVPSTPVDYKAIRESLTRSVRKRLMAEVPYGVLLSGGLDSSLVASIAQRETLRMQKASSGVKSEANGELVGIDDENELSTVNSFQQLQSFSIGLPGAPDTEAAMEVAKFLGTKHHALTFTIEDGLNALSDVIYHLETYDVTTIRASTPMYLLSRKIKGLGVKMVLSGEGSDEIFGGYLYFHAAPNKEEFHKETVRRVKNLHLADCLRANKSTSAWGLEARVPFLDKAFIETSMSVDPQEKMITKDRIEKYILRKAFDTSDEPDVEPYLPDKILWRQKEQFSDGVGYSWIDGLKDHAELHVTDEMMKNPKPEWGDDIPTTKEAYWYRMMFDEHFPSYCASTVERWVPTWSKQSDPSGRAIATHNAKYDDAE

SEQ ID NO: 19063 - protein, 506 aa, Rhodococcus erythropolis
MTKYARPGTADAIMSFQSRYDNWIGNEWVAPVKGQYFENPTPVTGQNFCDVARSTAEDIELALDAAHAAAPAWGKTSVAERAIILNKIADRMEENLESIALAESWDNGKPIRETLNADIPLAIDHFRYFAGAIRAQEGSLSEINSDTVAYHFHEPLGVVGQIIPWNFPILMAVWKLAPALAAGNAIVLKPAEQTPVSILHLIGIIGDLLPAGVLNIVNGFGVEAGKPLASSPRIKKIAFTGETTTGRLIMQYASQNLIPVTLELGGKSPNVFFSDVLASNDDYQDKALEGFTMFALNQGEVCTAPSRALIQEDIFDEFLAMAAIRTKAVRQGDPLDTDTMIGAQASNDQLEKILSYIEIGKAEGAKVITGGERAELGGDLSGGYYVQPTVFTGNNKMRIFQEIFGPVVSVTSFKDYDEAIEIANDTLYGLGAGVWSRDGGVAYRAGRDIQAGRVWTNTYHQYPAHAAFGGYKQSGIGRENHLMMLSHYQQTKNLLVSYAQKAQGFF

SEQ ID NO: 19064 - protein, 837 aa, Thermobifida fusca
MEVAAMKAVVMAGGEGTRLRPMTANQPKPLLPVVNRPIMEHVLRLLKRHGFEDTVVTVQFLATLIRNYFGDGEELGMSLRYVAEEVPLGTAGSVKNAEEHLRGEPFIVISGDALTDIDLTDMVRFHRENGALVTIGLKRVANPLEFGIIIVDDNGRIQRFLEKPTWGQVFSDTVNTGIYIMEPEVLDHVAPGENVDWSGDVFPKLLKAGAPLYGYIADGYWEDVGTHESYLRAQADVLSGKVDVEIDGFEVSPGIWVAEGAEVDPEAVLKGPLYIGDYAKVEPGAELREFTVLGSNVVVRSEAFLHRAVVHDNVYVGTRANLRGCVVGKNTDIMAGVRIEEGTVVGEECVLESEAYLANNIKVYPFKTIEAGAVVNTNVIWESKGQRSLFGPRGVSGLINVEITPELAVRLASAYATTLKKGAVVTTARDASRAARTLKRAVISALTAAAINVQDLEATPLPLARFHTSQPGLSGGIALRTTPGDPQSVDIVFLDSSGADLSPAAQRKLERVFSRQEYRRAFPGEIAELSFPSRSVEAYTRELLQSIDLSGVAEANLKVVVDCAGGTGSLILPALLSQIDADVLTVNNRLDEASPTDTPAKRTRDLQRLGELVASARADFGVRFDPVGERIQLVDGSGTLVDDERALLVVLDLVAAERQGGRVALPVTTTRVAEQVANRHGVDVQWTPTSLDALTKAALADDIIFAADGRGGFILPEFSRTCDGIAAFVRLIGLVARTKMSLSQIDQRIPQAHLLRRSVPTPWAVKGSVMREVVEAAQGREIDTTDGVRVIEPDGSWALVLPDTAEAVTHLWAEGPDDETAQRLLEEWSAVVERAEG

SEQ ID NO: 19065 - protein, 438 aa, Alternaria alternata [sequence omitted]

SEQ ID NO: 19066 - protein, 316 aa, Oryza sativa
SGSPGCRHTFFFLFDDVGIPTDYRHMDGFGVNTYTFVTRDAKARYVKFHWKPTCGVSCLMDDEATLVGGKNHSHATQDLYDSIAAGNFPEWKLFVQVIDPEEEERFDFDPLDDTKTWPEDEVPLRPVGRLVLNRNVDNFFNENEQLAFGPGLVVPGIYYSDDKMLQCRVFAYADTQRYRLGPNYLMLPVNAPKCAHHNNHYDGAMNFMHRDEEVDYYPSRHAPFRHAPSTPITPRPVVGRRQKATIHKQNDFKQPGERYRSWAPDRQERFIRRFAGELAHPKVSPELRAIWVNYLSQCDESLGVKIANRLNVKPSM

SEQ ID NO: 19067 - protein, 159 aa, Triticum aestivum
  unsure (1)..(159): unsure at all Xaa locations
MXPTVMGSSGTSVAPFXGLKSTAGLPVSRRSNXASLGSVSNGXRIRCMXVWXIEGIKKFETLSYLPPLXTEXLLKQVDYLIRSKWVPCLEFXKXGFIFREHNASPXYYDGRVXWQMWXXCYVPGAPTPTQVINGWGGGQKSNLDYVRHHSFRQQAKVQL

SEQ ID NO: 19068 - protein, 338 aa, Streptococcus pyogenes M1 GAS
MKAVVVNQASTGVEVVEHDLPNIGHGEALVKVEYCGVCHTDLHVAHGDFGQVPGRILGHEGIGIVEEIGEGVTSLKVGDRVSIAWFFEGCGHCEYCTTGRETLCRSVKNAGYSVDGGMSEYAVVTADYAVKVPEGLDPAQASSITCAGVTTYKAIKEAGAAPGQWIVIFGAGGLGNLAVQYAKKVFNAHVVAVDINNDKLELAKEVGADILVNGKEIEDVPGYIQEKTGGAHGVVVTAVSKVAFNQAIDSVRAGGTVVAVGLPSEYMELSIVKTVLDGIKVVGSLVGTRKDLEEAFAFGAEGLVAPVVEKVPVDTAPEVFDEMERGLIQGRKVLDFIS

SEQ ID NO: 19069 - protein, 311 aa, Clostridium thermocellum ATCC 27405
MGKLAFLFPGQGAQYIGMGKQIADEYKSADAIFDEASEVLGFDMKKMIFEGDEETLKITENTQPAILTTSVALLQPVLEKGIKPDVVAGLSLGEYSAHVAAGTMTFRDAVALVRKRGKFMQEAVPVGVGTMAAIIGLDSEAVKECCKKASSEGIVEPANFNCPGQITVAGEVKAVEKALEIAKEMGAKRAMLLAVSAPFHCSMLKPAGDKLAAELERVTLGDMQIPVVTNVTAEYIIDKDKVKDLLIRQVSSSVLFEDSIRNMIEDGVDTFVEIGPGKVLSGFVKKINKEMKTLNVEDIESLNKTLQELGA

SEQ ID NO: 19070 - protein, 248 aa, Burkholderia fungorum LB400
MVALGKRLLVESAGTAWLVFIGCGSIVLNVGAIQQAGGVLEAALAFGLALATASYCVGSLSGGHFNPAVTVGFTVAQRFPVRDLLPYIASQIFGAIVAAALLLYVAGGRPGFDLHATEFAANGFGDHSPADYQMHSALAIEFVLSFCFVMATLVISRRHDMEPIAPLVAGACLVLVYLVSIPVTNGSVNPARSTAQALFVGDWALDQLWLFWAAPLSGGVIAGALFSFLHGKPDNHTAALAEGRGEVV

SEQ ID NO: 19071 - protein, 367 aa, Prunus persica
MGKGGMSSQGGALEAHVEQENMAAWLVGVNTLRIQPFKLPTVGPNDVRVKIKAVGICGSDVHYLKTMKCADFVVQEPMVIGHECAGIVDEVGSLVKNLVPGDRVALEPGISCWRCEQCKGGRYNLCPDMKFFATPPVHGSLANQIVHPADLCFKLPENVSLEEGAMCEPLSVGVHACRRANIGPETNVLVIGAGPIGLVSVLSARAFGAARIVIVDVDDERLSIAKSLGADDAVKVSTNPQDLEDEVSKISKAMKGGVDVSFDCVGFNKTMSTALSATRPGGKVCLVGMGHGVMTVPLTPAAAREVDVVGIFRYKNTWPLCLEFLRTGKIDVKPLITHRFGFSQKEIEEAFETSARGGNAIKVMFNL

SEQ ID NO: 19072 - protein, 173 aa, Prunus armeniaca
MEHEETGCQPHPEGPILCVNNCGFFGSVATRNMCSKCHKDMMLKEEQAKLAASSFGNIVNGTSNSNGNEPVVAAGVDVQAHLVEPKTISLQPSFSFGSGSGGSGEAKPEGPKRCGTCNKRVGLTGFNCRCGHLFCAVHRYSDKHDCPYDYHTAARDVIAKANPVVKADKLEKI

SEQ ID NO: 19073 - protein, 315 aa, Zea mays
  unsure (1)..(315): unsure at all Xaa locations
MAVDLMGCYAPRRANDQLAIQXAAAAGLRSLELLVSSLSTQAAAPHRAAAHQLQKPPPQQPIGEIADQAVSRFRKVISILDRTGHARFRRGPVVEPPPVPPPAVSAPAPAPAPALPVAHVVAPVGAAQPQSLTLDFTKPNLAVSGATSVTSTSFFSSVTAGEGSVSKGRSLMSSGKPPLSGHKRKPCAGAHSEATTNGSRCHCSKRRKNRVKRSIRVPAISSKVADIPPDEYSWRKYGQKPIKGSPYPRGYYKCSTVRGCPARKHVERATDDPAMLVVTYEGEHRHTPGAVQGPSPLATASPVPVAVSAGNGLVV

SEQ ID NO: 19074 - protein, 478 aa, Xylella fastidiosa Dixon
MSEHYDVVVIGAGPAGYHAAIRAAQLGLKVACVDAALGKDGKPALGGTCLRVGCIPSKALLDSSRQYWNMGHLFNEHGISFKDAKMDVATMIARKDKIVKQFTGGIAMLFKANKITPYYGFAQLQPGNVVKVKQHEGKNIELKGANVILASGSDSVELPFATFDGETIVDNIGALDFTKVPKRLAVIGAGVIGLELGSVWKRLGAEVTILEAMPNFLAAVDADVAKTAAKEFKQQGLDIKLGAKVSRTEISSKNNKKEVIVTYTDASGKQTLTVDKLLVAVGRKAATKGLLADGTGVQLNERGQIVVDEHCHTGVDGVWAIGDCVRGPMLAHKGFEEGIAVAELIAGMPGHVNFETIPWVIYTEPEIAWVGKTEQELKADSIPYKAGSFPFAAVGRAVAMAEPSGFVKVLAHAETDRVLGLHLIGVNVSELVHEGVLAMEFSGSADDLARICHAHPTLSEAIHDAAMAVSKRAIHKAN

SEQ ID NO: 19075 - protein, 391 aa, Xylella fastidiosa Dixon
MSTEVKVPVLPESVSDATIASWHKKAGEIVKRDENIVDLETDKVVLEVPSPVDGVLKEIKFDTGSTVTSNQVLAIIEEESIVAAPSPAPSQVIDQKPVAVSAPAAKSNVDSLPPGARFTATTEGIDPAQIEGSGRRGAVTKEDIINFAKQNGAARASGTRLEERVPMTRIRQRIAERLMQSKNSTAMLTTFNEINLAKVSNIRKELQEEFQKAHGIKLGFMSFFVKAVANALQRFPLVNASIDGTDIIYHGYSDISIAVSTDKGLVTPVLRNVERMSFADIEHRIADYAKKARDGKLSLEELQGGTFTVTNGGTFGSLLSTPIVNPPQSAILGMHTIKERPIAENGHIVIAPMMYVALSYDHRIIDGKDSVQFLVDIKNQLEAPGRMLFGL

SEQ ID NO: 19076 - protein, 388 aa, Salmonella enterica subsp. salamae
QNGKLNVPENPIIPFIEGDGIGVDVTPAMLKVVDAAVEKAYKGERKISWMEIYTGEKSTQVYGQDVWLPAETLDLIRDYRVAIKGPLTTPVGGGIRSLNVALRQELDLYVCLRPVRYYQGTPSPVKHPELTDMVIFRENSEDIYAGIEWKADSADAEKVIKFLREEMGVKKIRFPEHCGIGIKPCSEEGTKRLVRAAIEYAITNARDSVTLVHKGNIMKFTEGAFKDWGYQLARDEFGGELIDGGPWLKIKNPNTGKEIVVKDVIADAFLQQILLRPAEYDVIACMNLNGDYISDALAAQVGGIGIAPGANIGDECALFEATHGTAPKYAGQDKVNPGSIILSAEMMLRHMQWFEAADLIVKGMEGAIAAKTVTYDFERLMEGAKLLK

SEQ ID NO: 19077 - protein, 243 aa, Arabidopsis thaliana
MIGQLMNLKATELCLGLPGGAEAVESPAKSAVGSKRGFSETVDLMLNLQSNKEGSVDLKNVSAVPKEKTTLKDPSKPPAKAQVVGWPPVRNYRKNMMTQQKTSSGAEEASSEKAGNFGGGAAGAGLVKVSMDGAPYLRKVDLKMYKSYQDLSDALAKMFSSFTMGNYGAQGMIDFMNESKLMNLLNSSEYVPSYEDKDGDWMLVGDVPWEMFVESCKRLRIMKGSEAVGLAPRAMEKYCKNRS

SEQ ID NO: 19078 - protein, 97 aa, Zea mays
  unsure (1)..(97): unsure at all Xaa locations
HTPHILQALRLAMGIYEDALVLIVNFRYQDAFQSTFCHLKPXYMDTLVIIPVSSDGTSILGLKLAIAVXHNRINGFHTELDLLTFKGLYHTWIKYTI

SEQ ID NO: 19079 - protein, 519 aa, Schizosaccharomyces pombe
MLIFVSMAGWMFGADTRSIGGVTSMRDFRERYADRYDPITDQYSLSSARQGLLTGMVNVGSLFGCIISSPIADRFGKRLSIIGFCAVYIIGIIVQVTAVPSWVQIMVAKIWTGIGIGALSVLAPGYQSETAPPSIRGTVVVTYQLFVTGGIFIAACINMGTHKLHKTAQWRVSIGINLLWGIITMIGILFLPESPRYLIQVGKDEEAVRVLSESAELFPDSEEVQNEYHRLKSSIDEEFAGGPCSWASIFGKDIRYRTFLGMFVMSLQQLTGNNYFFYYGFSVMQGAGINSPYLSAMILDAVNFGCTFGGMYVLERFGRRNPLIIGGIWQSICFFIYSAVGSRALYHKNGTSNTRAGAVMIVMACLFIFGFAQTWAPAAYVIVGESYPVRYRSKCAAVATASNWLWNFLISFFTPFIQASIGFKYGYVFASCNLTGAIVIFLFAKETKGLTLEEINELYMSVIKPWESGNFKLNYSEQKKVEKEKSRKGGARGESVEYVERASNTDSSPQYSSHEEDYA

SEQ ID NO: 19080 - protein, 500 aa, Pirellula sp. 1
MGKPTGFKEFDREKVAWRLPVIRINDYDEIYTEPKTEHLQRQGARCMDCGVPFCQSATGCPIDNLIPEWNDLVYNNRWKEAIERLHKTNNFPEFTGRVCPAPCEGSCVLGITNPPVTIKNIENAIVDRAWEEGWIVAEPPEQRTGKKVAVIGSGPAGLTAADQLNKAGHLVTVYERADRIGGLLQYGIPNMKLSKKAVQRRVDKMTEEGVTFKTGVNVGVDVSPKELQSEFDAVLLACGATKPRDLPIPGREAKGVHFAMDFLTSNTKQRVHSDNLGAEFISAEGKDVIVIGGGDTGTDCIGTSLRHGCRSMVNFELLPQPPAERADDNPWPEWPRIFRVDYGHEEAEAKFGKDPREYQILSKEYLVDDEGKLKGIKTVNVEWTKNDEGGWQMAEVEGSEKEWPAQLILLAMGFLGPEQTVAESLGLETDARSNFQAEHGKYATNIDGVFAAGDCRRGQSLVVWAINEGRGAARAIDIFLEGSSNLPAPGQTMGTSMAAV

SEQ ID NO: 19081 - protein, 264 aa, Zea mays
  unsure (1)..(264): unsure at all Xaa locations
MDPKMTEVTQMFARFKAAYARNDLNTCVTLLSQLKVHLTQFPSLPPLFQQTPNIVEELKLARDIYEHAVVLSVKLEDQDAFERDFCQLKPYYMDTCGIIPASPEEYPILGLNLLRLLVQNRIAEFHTELELLPVKALEHPCIKHAVELEQSFMEGAYNRVLSARQAVPHETYVYFIDLLAKTVRDETAGCSEKGYDSLSVSDAKQMLMFSSDQDLHEYITGGAPXNGRIXXTVAVFFQKRRKESQPPAREIPILLQLIXPDAQL

SEQ ID NO: 19082 - protein, 424 aa, Pirellula sp. 1
MSSAAAASETTQNSDPYIQSLFAERIGGANYGKSTEIYKFEKIKRAKRKALADHPERQLLDFGIGENDSMADASIREVMGREINQVENRGYADNGVAEYKEAAARFMQRQFGVKLDPETQINHCIGSKPAYAMLPACFINPGDITMMTVPGYPVAGTHTRYYGGDVYRLPLLAENKFLPDLDAIPDDVFRRTKLMILNYPNSPTGGTAPKSFFEDVITLAKEKEFVVVNDAAHIMLTFDGKPTSFLEVPGALDVGVEVHSMSKGYDMIGWRMGFVAGHPLVVKAFSDVKDNSDSGQFIATQKAAAAALDDDSIPERIRTKYRRRMEKLVKVLRDCGFEAEMPGGTYFLYTKSPTGTASGETFAAAEDATRFLIEENGIVTVPWDDAGSFLRFSVTYIAEDEAAEDALMAETAARLSGAGFQWKS

SEQ ID NO: 19083 - protein, 316 aa, Escherichia coli O157:H7 EDL933
MNELDGIKQFTTVVADSGDIESIRHYHPQDATTNPSLLLKAAGLSQYEHLIDDAIAWGKKNGKTQEQQVVAACDKLAVNFGAEILKIVPGRVSTEVDARLSFDKEKSIEKARHLVDLYQQQGVEKSRILIKLASTWEGIRAAEELEKEGINCNLTLLFSFAQARACAEAGVFLISPFVGRIYDWYQARKPMDPYVVEEDPGVKSVRNIYDYYKQHHYETIVMGASFRRTEQILALTGCDRLTIAPNLLKELQEKVSPVVRKLIPPSQTFPRPAPMSEAEFRWEHNQDAMAVEKLSEGIRLFAVDQRKLEDLLAAKL

SEQ ID NO: 19084 - protein, 381 aa, Glycine max
  unsure (1)..(381): unsure at all Xaa locations
KQTQENTGLWTYNQLADGPFFDLVGNNLPVFFVRDGMKFPDMVHALKPNPKNHIQENWRILDFFSHXPESLHMFTFLFDDLGVPQDYRHMDGFGVNTYTLINKAGKAVYVKFHWKTTSGIKCLLEEEAIKVGGANHSHATQDLHDSIAAGNYPEWKLFVQTIXDPEHEXKFDFDPLDVTKTWPEDIIXLQPVGRLVLNKNIDNFFAENEQLAFCPAIVVPGVYYSDDKMLQTRIFSYADSQRHRLGPNYLQLPANAPKCAHHNNHHEGFMNFIHRDEEVNYFPSRYDPVRHAERFPIPPAICSGRREKCGIEKENNFKQPGERYRSWAPDRQDRFARRWVDALSDPRVTHEIRSVWISYWSQADRSLGQKIASHLSTRPNI

SEQ ID NO: 19085 - protein, 244 aa, Bifidobacterium longum NCC2705
MDYPLFTKLAAEFFGTAILMIFGNGSVANVELKNTKGHHAGWLNIAMGYGFGVMFPVLMFGSVSGAHINPAMTIAQAVNGLFPWSDVLPYIVAQLLGALLGQLIVYITYYPHYKETEDAEAILGTFCTTDADNQKVNYFLNEMFGTLVLVFGALCCLSLAWGKQDYAAASIVVGFIVWGLVTSMGGPTGPGLNPARDLMPRLLHAILPIPHKGSSRWGEAWIPVVAPIVGAIIGAWLFVFFFAS

SEQ ID NO: 19086 - protein, 264 aa, Pseudomonas putida KT2440
MKTIYMVGAGHMGGAILLGLKAYFKSATDLRVIEIDTQRSNDWRAKGFETSSRIQTLQPQDCVVLAVPPQQFENMLAANPVLCRHRGPVVSVMAGITHATLVRLLGHDAVVRAIPNTPSEVAQGVTMYYAPSDADAALIDSARQIFDVIGLSLRVNDERQIDTGTALAGGGPALVAHFADALQDYGLHMGLDSEQAAVVALQLLSGTAALIQASGKPASQICQEVQTAGGTTERAIRALDAAGFKGLVNAALDAAARRSAELGQ

SEQ ID NO: 19087 - protein, 273 aa, Lactobacillus johnsonii NCC 533
MKHLTLNNGVKIPIFGFGTYEISPDQTKEAVLSAFKDGYRLIDTAQYYQNEQQVGEAVRASNLNRDEVFITTKTMTDGYEATKQGLDESLNKSGLDYFDLVLIHWPMGHDLDTWRALEEAYKAGKTRAIGISNFNSRQTLELINHAEIRPMVDQIETHLLLQQWKMHEFLKKENIIHESYSPLGNGQQNLMTNPVLQKIGEKYGKSPIQVILRYLVQNDIVTIPRSTNPAHIKANIDIFDFELDKEDLKQLCALDERKPIDGWPAEMREDEDY

SEQ ID NO: 19088 - protein, 388 aa, Salmonella enterica subsp. VII
QNGKLNVPENPIIPFIEGDGIGVDVTPAMLKVVDAAVEKAYKGERKISWMEIYTGEKSTQVYGQDVWLPAETLDLIRDYRVAIKGPLTTPVGGGIRSLNVALRQELDLYVCLRPVRYYQGTPSPVKHPELTDMVIFRENSEDIYAGIEWKADSADAEKVIKFLREEMGVKKIRFPEHCGIGIKPCSEEGTRRLVRAAIEYAITNDRDSVTLVHKGNIMKFTEGAFKDWGYQLARDEFGGELIDGGPWLKIKNPNTGKEIVVKDVIADAFLQQILLRPAEYDVIACMNLNGDYISDALAAQVGGIGIAPGANIGDECALFEATHGTAPKYAGQDKVNPGSIILSAEMMLRHMQWFEAADLIVKGMEGAIAAKTVTYDFERLMEGAKLLK

SEQ ID NO: 19089 - protein, 294 aa, Zea mays
MGTGRCYPADAPKGKSVEEAHQAQARHAIHTRQATPRARARPATRERSVLVRSLAPRRRVGVPMSCAGQAGGWLLDYALVEEEIQGSEFIYMVDDPAVSRSRPESSAPPGTKACREKLRRDRLNERFNELCAILEPGKPPKADKVAILSDAARLLNQLQGEAQKLKQSNESLQESIKSLKCMELYSIDLPVQCVALQAEKSELRDEKTRLKAEKERLEQMLKGVVSHAAVAAPGPFVPHPAAVAPSFHHHPAAFAQAGKFVPYPSYPPPAAFWQWIPPTSLDTTKDPAHWPPVA

SEQ ID NO: 19090 - protein, 388 aa, Salmonella enterica subsp. houtenae
QNGKLNVPENPIIPFIEGDGIGVDVTPAMLKVVDAAVEKAYKGERKISWMEIYTGEKSTQVYGQDVWLPAETLDLIRDYRVAIKGPLTTPVGGGIRSLNVALRQELDLYVCLRPVRYYQGTPSPVKHPELTDMVIFRENSEDIYAGIEWKADSADAEKVIKFLREEMGVKKIRFPEHCGIGIKPCSEEGTRRLVRAALEYAITNDRDSVTLVHKGNIMKFTEGAFKDWGYQLARDEFGGELIDGGPWLKIKNPNTGKEIVVKDVIADAFLQQILLRPAEYDVIACMNLNGDYISDALAAQVGGIGIAPGANIGDECALFEATHGTAPKYAGQDKVNPGSIILSAEMMLRHMQWFEAADLIVKGMEGAIAAKTVTYDFERLMEGAKLLK

SEQ ID NO: 19091 - protein, 222 aa, Pseudomonas wisconsinensis
MSIRRLACSLLLSSLALPVLAAECPAMLQGELPKLRAKGENIELCQYAGKPLVVVNTASFCGFTPQFKGLEALYQRYKDQELEVLGVPSDDFRQESADSKETATVCYVNYGVTFAMTEPQPVSGANAIPLFKGLAEQSRQPRWNFFKYVVDRQGKVVASFSSLTKPDDPELIAARREGDRLATLIPSRFTALHPSGRWALSVCLPRLARRRTQFTRRALQEQ

SEQ ID NO: 19092 - protein, 343 aa, Phytophthora infestans
MFSSSKIAAVCLAVVALTNSAYAEKEAAQTFGLLGAGLHGGAGLYGAGAAGLHGGAGVGAGLYGRGAGYGGAGAGLYGRGAGGVGAGLYGRGAGYGGAGAGLYGRGAGGVGAGLYGRGAGYGGAGAGLYGRGAGGVGAGLYGRGAAYGGAGAGLFGREAGYGGAGAGVGAGVGGAGLGNGYGGVGVGGTTGVGAGAGVGGGVSGNVGAGVGVGGNAAVGAGVGGAANGGVGANAGVGAGVSGNTGAGVGGGASGGANGGVSANAGVGGGVGGSAGVGGSVGVGGAASTGAGGATTTTDGRTSTSTSQNGGPRQLQLPRLQARPRTAGTGASTKQTGYRMLRSQ

SEQ ID NO: 19093 - protein, 243 aa, Burkholderia fungorum LB400
MSKTHFGFQSVDEQDKAQKVAGVFHSVAANYDLMNDLMSGGLHRAWKMFTIAQANVRPGYKVLDIAGGTGDLSKAFAKQAGETGEVWHTDINESMLRVGRDRLLDKGVITPALLCDAEKIPFPDNYFDVVTVAFGLRNMTHKDIALAEMRRVLKPAGRLLVLEFSKVWDPLKKVYDVYSFKVLPWLGEHFAKDAGSYQYLAESIRMHPDQETLKTMMEQAGLDGVKYYNLSAGVVALHVGTKY

SEQ ID NO: 19094 - protein, 394 aa, Oceanobacillus iheyensis HTE831
MELAQRVQTLTPSSTLAITAKAKDLKKQGFDVIGLGAGEPDFNTPEYIMDGAKQAMNNGLTKYTPAGGIAELKLAIIDKFKQDNGLSYNEKQIIVTNGAKHALYTLFQVILNKEDEVIIPSPYWVSYPEQVKLAEGNPIILPAAETNDFKITPTQLEEAITPKTKAVIINSPSNPTGLMYSKEELAALGEVCLKHNIIIVSDEIYEKLIYTSKEHVSIASISDELYNQTIIINGVSKSHAMTGWRIGYAAGNETIIKAMTNLASHSTSNPTSIAQYGALAAYTKDPGDISLEYKKIFAERLDAFYKLIQDIPGMECIKPEGAFYLFPNAKKAAEMNGFATVDEWVAALLEEEKVALVPGSGFGSPDNVRLSYALSIEELTEAANRIHRFVLNHK

SEQ ID NO: 19095 - protein, 364 aa, Triticum aestivum
  unsure (1)..(364): unsure at all Xaa locations
MASRLASRLLLRRPAAVLSLLQSSRHARHFSTQLLEGVPRLPKPTCERYFLRNASPYQIWSRSFASENGDLVEAVVPFMGESVTDGTLANFLKKPGDRVEADEAIAQIETDKVTIDVSSPEAGVIEKFIASEGDTVTPGTKVAVISKSAAPSEAHVAPSEETSQKETPPPPPPEKPKVEAKSPKVESVKPQASKLASPSEPQLPPKERERRVSMPRLRKRIANRLKDSQNTFALLTTFNEVDMTNLMKLRTDYKDEFVKKHGVKLGLMSCFVKAAVSALQNQPIVNAVIDGDDIIYRDYIDVSVAVGTSKGLVVPVIRDTEGMNLLTLXGDNXLXXXXLXGITVDEMXGGTQQGFKDLQLTSGS

SEQ ID NO: 19096 - protein, 395 aa, Bacillus cereus ATCC 14579
MKLAKRVAALTPSSTLEITAKAQALKAEGHDVIGLGAGEPDFNTPEHIMDAAHKAMLEGHTKYTPTGGLQSLKQEIVKKFTRDQGIAYDPSEIIVCNGAKHALYTLFQVLLDEGDEVIIPTPYWVSYPEQVKLAGGKPVYVEGLEDNEYKITAKQLREAITEKTKAVIINSPSNPTGMIYSKEELQQLGEVCLEHDILIVSDEIYEKLIYGGVEYTSIAQLSNALKEQTLIINGVSKSHSMTGWRIGYAAGNKQLIKAMTNLASHSTSNPTSIAQYGAIAAYTGSQEPVETMRQAFEERLNIIYDKLIQIPGFTCIKPQGAFYLFPNVKEAVALSGYATVDDWAKALLEEEKVALVPGTGFGAPNNVRLSYATSLEQVEKALERIHTFMKSKVQA

SEQ ID NO: 19097 - protein, 178 aa, Glycine max
MQHRNLTSGRPSGTDGSDYSYRMVVDSRYQLVAKGKKRLSLYFITEAVLLLIGVTLTYLPGIEADAPNTVAYSSVIVSVVSLIIGNIGRRRSRSGLLRFYAAVSSIAMLLLIASLAQQHLLLKAIQDSKLWKTGKYDVNELSHFQIGLLLYMVTLSVLKLCTVNAVVSLLFNMALNPH

SEQ ID NO: 19098 - protein, 307 aa, Geobacter sulfurreducens PCA
MSKRAFIFPGQGSQYAGMGKDLADTFPVARQVFEEADDALGSSLSRLCFEGPEEQLKLTANTQPAILTTSVAAFRVLQAETGLTADFLAGHSLGEYSALVAAGALGFADAVRTVRARGTFMQEAVPVGEGAMAAMLGIEPAVLAEICAEAAQGEVVSPANFNSPGQIVIAGNTGAVNRAIEIAKAKGFRKAMLLPVSAPFHSSLMVPAGERLAEVLAAVAVGDLVAPVVTNVEATPNSDKGRVKELLVRQVSAPVLWDASVREMVSLGVTRFVEIGPGKVLSGLVKRIEKEAGTANVEDTAGIRGLA

SEQ ID NO: 19099 - protein, 388 aa, Salmonella enterica subsp. diarizonae
QNGKLNVPENPIIPFIEGDGIGVDVTPAMLKVVDAAVEKAYKGERKISWMEIYTGEKSTQVYGQDVWLPAETLDLIRDYRVAIKGPLTTPVGGGIRSLNVALRQELDLYVCLRPVRYYQGTPSPVKHPELTDMVIFRENSEDIYAGIEWKADSADAEKVIKFLREEMGVKKIRFPEHCGIGIKPCSEEGTKRLVRAAIEYAITNDRDSVTLVHKGNIMKFTEGAFKDWGYQLARDEFGGELIDGGPWLKIKNPNTGKEIVVKDVIADAFLQQILLRPAEYDVIACMNLNGDYISDALAAQVGGIGIAPGANIGDECALFEATHGTAPKYAGQDKVNPGSIILSAEMMLRHMQWFEAADLIVKGMEGAIAAKTVTYDFERLMEGAKLLK

SEQ ID NO: 19100 - protein, 291 aa, Lactobacillus johnsonii NCC 533
MTEVPTITLNDGNKMPLLGLGVFQIPDHEKARQTVEMALANGYRMIDTAEVYENQIAVGEAIAESAVNRDDIFLTTKIWVSNMSFEKATKAIDHDLKELGTDYLDLVLLHQPYGDTFGAWNALAAAKRAGKVRSIGLSNFYPDQYMNLELAHEDKPAINQIEINPWFQQTNDVKFFQGRDVVVEAWAQFAEGKHDIFNNKTLKEIADAHHKTTAQVILRWLTQQDIVVIPKSVHEKRQKENLDIFDFELTKDEMDKIKGLDKGVSQFFDHRDPAVIDDIFGESLKQLRDSE

SEQ ID NO: 19101 - protein, 399 aa, Rickettsia prowazekii
MSIISTRLNSIKPSPTLAVVKKTLELKKAGVNIIALGAGEPDFDTPDNIKEVAITSIKDGFTKYTNVDGIPLLKQAIKNKFKRENNIDYELDEIIVSTGGKQVIYNLFMASLDKGDEVIIPVPYWVSYPDMVALSTGTPVFVNCGIENNFKLSVEALEHSITDKTKWLIINSPSNPTGAGYNCKELENIAKTLRKYPNVNIMSDDIYEHITFDDFKFYTLAQIAPDLKERIFTVNGVSKAYSMTGWRIGYGAGSKALIKAMTIIQSQSTSNPCSISQMAAIEALNGTQDYIKSNALNFQKKRDLALSILEEVTYFECYKPEGAFYLFVKCDKIFGTKTKSGRIIANSNNFSEYLLEEAKVAVVPGIAFGLDGYFRISYATSMQELEEACIRIKHACNAL

SEQ ID NO: 19102 - protein, 388 aa, Salmonella enterica subsp. diarizonae
QNGKLNVPENPIIPFIEGDGIGVDVTPAMLKVVDAAVEKAYKGERKISWMEIYTGEKSTQVYGQDVWLPAETLDLIRDYRVAIKGPLTTPVGGGIRSLNVALRQELDLYVCLRPVRYYQGTPSPVKHPELTDMVIFRENSEDIYAGIEWKADSADAEKVIKFLREEMGVKKIRFPEHCGIGIKPCSEEGTKRLVRAAIEYAITNDRDSVTLVHKGNIMKFTEGAFKDWGYQLARDEFGGELIDGGPWLKIKNPNTGKEIVVKDVIADAFLQQILLRPAEYDVIACMNLNGDYISDALAAQVGGIGIAPGANIGDECALFEATHGTAPKYAGQDKVNPGSIILSAEMMLRHMQWFEAADLIVKGMEGAIAAKTVTYDFERLMDGAKLLK

SEQ ID NO: 19103 - protein, 388 aa, Salmonella enterica subsp. arizonae
QNGKLNVPENPIIPFIEGDGIGVDVTPAMLKVVDAAVEKAYKGERKISWMEIYTGEKSTQVYGQDVWLPAETLDLIRDYRVAIKGPLTTPVGGGIRSLNVALRQELDLYVCLRPVRYYQGTPSPVKHPELTDMVIFRENSEDIYAGIEWKADSADAEKVIKFLREEMGVKKIRFPEHCGIGIKPCSEEGTKRLVRAAIEYAITNDRDSVTLVHKGNIMKFTEGAFKDWGYQLARDEFSGELIDGGPWLKIKNPNTGKEIVVKDVIADAFLQQILLRPAEYDVIACMNLNGDYISDALAAQVGGIGIAPGANIGDECALFEATHGTAPKYAGQDKVNPGSIILSAEMMLRHMQWFEAADLIVKGMEGAIAAKTVTYDFERLMDGAKLLK

SEQ ID NO: 19104 - protein, 139 aa, Glycine max
  unsure (1)..(139): unsure at all Xaa locations
MGLSCFDILQGHSKATVXLIADNAAQGILSYFFFKYADTIEKKYXSSVATIFTGVGSGALFGHTXTMNTDIGICIVNIXMHQLFTPLSKDNDERIGALELXNDMTNRSHXESFINMATXANDEATHRVGHDERQALLPF

SEQ ID NO: 19105 - protein, 369 aa, Neurospora crassa
MSPNPEHGASAPTDPPAADAEQKSDSSAPATPPPAPVPSADPKLFRQITQSHTGESDQDVDDIYKVSPLAALKLLSAGIETLVSFTGDIPPTPPPRSPTIPHMRGMDAEKQSIVRSNSEKNLARLLQQKSATNSPRRPFSPAPQRHPHPPPSREGHKQSQSIDGVQLRTPNPTPPPGLSSSDAKSALEPYIIVGENSQPLNTQHSAITRKFYSRLPPPISITDYLLRIHQYCPMSTAVYLAASLYIHRLAIIERAIVVTKRNAHRLLLAGIRVAMKALEDLSYPHSKFAKVGGVSETELARLEISFCFLVGFELRVDEEALRGQWEMLKSGVEAWEGVEHDFYGKREVITLRNPPPGREGMQAEAAAEA

SEQ ID NO: 19106 - protein, 253 aa, Glycine max
LGHVIDKLSVSFGLEILKVVPGYVSTEVDARLSFDTAATIARAHRIIDLYEKAGIKKDRVLIKIASTWEGIQACKHLQKEGISCNMTLLFGFAQAVGCAEAGATLISPFVGRILDWHKAKTGKSSYESHEDPGVVSVTKIYQYYKKYDYKTIVMGASFRNTGEITELAGCDRLTISPGLLEELAKSTSKLDKKLDPETAAKAYTGEKVSYDEKGFRLSMNEDAMATEKLAEGIRGFSADIVKLEQILKAKLSA

SEQ ID NO: 19107 - protein, 562 aa, Methylococcus capsulatus str. Bath
MSRHELLIDGMTCTSCAEHVRQALEKVPSVRSASVSFPRKRAEIEADPGVGPDPLVAAVTALGYRARVSDTPGKSAGGLFDETFGCPDGGTKRVSGEPALHVTVIGSGGAAMAGALKAVELGARVTLIERGTIGGTCVNVGCVPSKIMIRAAHIAHLRRESPFDEGLPPTPPVVLRERLLAQQQGRVEELRHAKYEGILASTPAVTVLRGEARFMDAHTLTVALCHGGTRELSFDRCLVATGASPAIAPIQGLADTPYWTSTEALASDTIPERLAVIGSSVVAVELAQAFARLGSRVSILARRTLFFREDPAIGEAVTNAFRLEGIEVLEHAQASQVAYANGEFVMTTGHGERRADKLLVATGRAPNTRNLNLEAAGIKVDAQGAIIVDRAMRTSAPHIFAAGDCTDQPQFVYVAAAAGSRAAINMTGGSAELDLTTMPKVTFIDPQVATVGYSEAEARHDGIETVSRTLTLDNVPRALANFDTRGFIKLVAEAGTGRLIGVQAVAPEAGELIQAAALAIRHRMTVQELADQLFPYLTMVEGLKLAAQTFTKDVKRLSCCAG

SEQ ID NO: 19108 - protein, 459 aa, Rickettsia rickettsii
MEQYDVAVIGGGPGGYVAAIRAAQLKKKVVLIEKEHLGGVCLNWGCIPTKSLLKSAEVFEYIKHAKDYGIDAKGAEINIKKIVERSREISNKLAGGVKLLLKKNKVTVIDGVASLAGNKVININDKPTVKAGNIIIATGARSRVLKGFKPDGKQIWTSKEAMIPQHVPKSMIIVGSGAIGIEFASFYNSIGVDVTVIEAHNRILPAEDMEISGIAHKNFEKKGIKIITNAKLIKQTKSKDKIEVELELADKTQKLQAEILLMAVGITANTENLGLEKTKIKVENGYITTNGLMQTAVSGIYAIGDVAGVPCLAHKASHEGIIAAESIAGLKPHTINKHNIPGCTYSSPQIASVGLTEEAATTLGYELKIGRFPFIANGKALVSGDSDGLIKTIFDAKTGELLGAHMIGSEVTELIQGYVVSKNLEGTELDLINTIFPHPTLSEMMHESVFSAYDRAIHI

SEQ ID NO: 19109 - protein, 178 aa, Zea mays
MASSMISSPAVTTVNRAGAGMVAPFTGLKSMAGFPTRKTNNDITSIASNGGRVQCMQVWPPIGKKKFETLSYLPDLDDAQLAKEVEYLLRKGWIPCLEFELEHGFVYREHNRSPGYYDGRYWTMWKLPMFGCTDASQVLKELQEAKTAYPNGFIRIIGFDNVRQVQCISFIAYKPPGF

SEQ ID NO: 19110 - protein, 174 aa, Pseudomonas putida
MKTLVDHLSQYANYHRDPRNIATHFVGIPMIVLAVTILLSRPGWEIAGMWLSPALVAAAASVWFYLRLDLRFGLVMGLLLGLCLWVGEALAVQSTTLWLGAGLGAFVVGWIIQFIGHYYEGRKPAFVDDVSGLIIGPLFVVAEAAFMLGLCPTLKRAVETNAGPIAMRQKKASV

SEQ ID NO: 19111 - protein, 401 aa, Bifidobacterium longum DJO10A
MAQWQTLSDRINTVAPSATLAVDSKAKAMKAAGLDVVGFGAGEPNFPTPANVVKAAADACLDPKNYKYTPTPGLPELREAIAAKMLRDSGYEVNADQVVVTNGGKQAVYESFQILLNDGDEVIIPAPYWTSYPEAVKLAGGVPVEVFAGADMNFEPSLEALEAARTEHTKAIIVNSPNNPTGAVWKPETVEAIGRWAVEHHIWVISDEIYEHLNYDDAHTTYIGAAVPECRGQLLVLNGVAKTYAMPGWRVGWMVAPLEVAKAAAKLQGHMTSNVANISQRAALAAVAGPLDEVHEMRKAFDARRRAIVTALNDIEGVNCPTPTGAFYAFADITALLGKPLGPKGTVSDTSADFAAALLDEAHVAAVPGEAFGAPGYLRFSYALADEDLAEGMRRFKEWAN

SEQ ID NO: 19112 - protein, 400 aa, Bacillus sp. CY22
MNNLAFLFPGQGSQFVGMGKPFWNDFVLAKRLFEEASDAISLDVKKLCFNGDMNELTKTMNAQPAILTVSVIAFQVYMQEIGVKPRFLAGHSLGEYSALVCAGALSFQDAVTLVRERGILMQNADPKQQGAMAAVTHLSLQTLQEICSKVSTEDFPAGVACMNSEQQHVISGHRQAVERVIKMAEEKGAAYTYLNVSAPFHSSMIRSASEQFQTVLQRYSFRDAAWPIISNVTARPYSSGNSISEHLKQHMMMPVRWTESMHYLLLHGVTEVIEMGPNNVLAGLLRKTTNHIVPYPLGQTSDVPPLSNSAERKKHIVHLRKKQLNKLMIQSVIARNYNKDSAAYSNMTTPLFTQIQELKERMKRHEDVLSEQELEHSIHLCKLICEAKQLPAWEELRILK

SEQ ID NO: 19113 - protein, 116 aa, Oryza sativa
  unsure (1)..(116): unsure at all Xaa locations
IYTREGGFELAGNTMPVLLIIHGMKLPDVMTAPEQCARTNVQDNWIIDCILXHQRHSLHMFCLVYDDVSARLNYWHMEVWGDNTYTIINTDRXPHRVKFDXXPTCDDKCLWDDEAV

SEQ ID NO: 19114 - protein, 388 aa, Salmonella bongori
QNGKLNVPENPIIPFIEGDGIGVDVTPAMLKVVDAAVEKAYKGERKISWMEIYTGEKSTQVYGQDVWLPAETLDLIREYRVAIKGPLTTPVGGGIRSLNVALRQELDLYVCLRPVRYYQGTPSPVKHPELTDMVIFRENSEDIYAGIEWKADSADAEKVIKFLREEMGVKKIRFPEHCGIGIKPCSEEGTKRLVRAAIEYAITNDRDSVTLVHKGNIMKFTEGAFKDWGYQLARDEFGGELIDGGPWMKIKNPNTGKEIVVKDVIADAFLQQILLRPAEYDVIACMNLNGDYISDALAAQVGGIGIAPGANIGDECALFEATHGTAPKYAGQDKVNPGSIILSAEMMLRHMQWFEAADLIVKGMEGAIAAKTVTYDFERLMEGAKLLK

SEQ ID NO: 19115 - protein, 388 aa, Citrobacter koseri
QNGKLNVPENPIIPFIEGDGIGVDVTPAMLKVVDAAVEKAYKGERKISWMEIYTGEKSTQVYGQDVWLPAETLDLIRDYRVAIKGPLTTPVGGGIRSLNVALRQELDLYVCLRPVRYYQGTPSPVKHPELTDMVIFRENAEDIYAGIEWKADSADAEKVIKFLREEMGVKKIRFPEHCGIGIKPCSEEGTKRLVRAAIEYAIANDRDSVTLVHKGNIMKFTEGAFKDWGYQLARDEFGGELIDGGPWVKIKNPNTGKEIVIKDVIADAFLQQILLRPAEYDVIACMNLNGDYISDALAAQVGGIGIAPGANIGDECALFEATHGTAPKYAGQDKVNPGSIILSAEMMLRHMQWFEAADLIVKGMEGAIAAKTVTYDFERLMEGAKLLK

SEQ ID NO: 19116 - protein, 92 aa, Glycine max
ATFTGLKSMAGLPIRKTNRVISCTASNGGRMQCMQVMSPLGTKKFETLSYMTDLDDAQSAKEVEYLFTKGWINCLEIQLEHRVLYLEHNMSP

SEQ ID NO: 19117 - protein, 476 aa, Bordetella pertussis Tohama I
MHANFIDGAWLDGVDARPNINPSNLADVVGDYAQADAAQAGMAIAAASAAAHAWARSTGQRRADVLDAVGTELLARKEELGRLLSREEGKTLPEGVSEVTRAGHIFKFFAGEALRIQGEKLPMTRPGIEVDVTREPVGVVGIIAPWNFPIAIPAWKIAPALAYGNTVVFKPADLVPGSAWALAEILSRAGLPAGVFNLVMGRGSVVGQAILDDRRVNAISFTGSVATGRRVAEAAIGRMAKVQLEMGGKNPLVVLNDADLKVAVDCAVNGAFFSTGQRCTASSRLIVQKGIYPRFVEAVRERLQGLKVDDALAPGTDIGPVVDRSQFDQNLAYIAIGREEGAQLAWGGEPLKRANEGYYLAPALFVDCDNSLRIAREEIFGPVAAVIPVDSYEQALEVANDTEFGLSSGIVTTSLRHATHFKRESQAGMVMVNCPTAGVDYHVPFGGRKGSSYGPREQGRHAAEFYTSVKTAYTAA

SEQ ID NO: 19118 - protein, 274 aa, Xanthomonas campestris pv. campestris str. ATCC 33913
MSRQLVGELISEAVAMFIIIALGDSVAAMYILYDPSPYQNAYWGVCIAWGLAVTLAIYVTGSVSGTHANPAVTLALALFRDFSWKKVLPYWGAQVVGAFLGAAIVYQLYGPVIDHYNQVQQLTREAGGAAGVFFTAPGLAVTPMHALVDQIIITAFLIFGIFAITERFNEAAPTANSGALMIGLLVATLGASMGYLEAWAMNPARDFGPRLFAYFAGWGEAALPAKDNYWWIPIVGPLIGGPLGALAYQWLILPFLPARVLHLQKAATPPLDPP

SEQ ID NO: 19119 - protein, 431 aa, Bifidobacterium longum NCC2705
MGAIDSGNTAWILTSASLVFLMTPGVAFFYGGMVRAKAVLNMLMLEAAALSVTMIVWTLWGWSIAYAGSDIGGIFGDPASGFLLKDSMVAQDGVFTATGLNGNNYPVSVDVAFQVAFAMITVGLICGAIAERVKYSTWMIFVALWVTFDYAPMAHMVWNGGLLSADGAISKAIGAAAHDFAGGTVVHINAAVAALIIVLIIGKRKGFGTQPFRPHNVPFVMLGAFLLWFGWFGFNAGSAFAANGTAGYAWVSTSAATAAAMLSWGFTEKIRSGHYTAMGAASGMVAGLVAITPAADVVSPLWAIVMGAIAGVLTCLACGLKFKFGYDDSLDVVGVHGVGGFTGTILIGFFGEGTGLLAGGDWKQLVVQLVIALVAILYSAVITAIIAFALEKTIGWRVTEAQEVGGIDLADQGERAYDFAGTASSVLKEVK

SEQ ID NO: 19120 - protein, 497 aa, Pirellula sp. 1
MSSATESSSSNGAASPDETPDINLPAPEAKPAAKPAPDKFDFDLFVIGTGPGGEGAAMQAAKGGLRVGVAERYRQIGGGCTHWGTIPSKALRYAVTSTMKSLKNPVMREMGFAASPSMEQLNRGTQAIIGRQVTMRQSFYDRNSVPISRGQARFVDEHTITIDNGELITAAAFVISTGSRPYRPKGVDFSHPRIFDSDTILEMKDKPTSITVYGAGVIGTEYASMFRNLGIKVNLINTRDKLLEFLDDEIIDALSYHLRDQGVIIRHNETMESIEGLDDGVILRLKSGKVLKTDVFLWANGRQGNTDDLGLKNLPIEANSRGQIVVDEHFQTCLPHIYAVGDVIGIPSLASAAYTQGRAAGMHLLGRVDGNLRLNDIPTGIYTSPEISSVGSTERELTERCVPYEVGQAQFRSLARAQITGETTGMLKLLFHRETKEILGVHCFGANASEIIHIGQAIMNQPGRQNTIDYFIETTFNYPTMAEAYRVAALNGLNRLF

SEQ ID NO: 19121 - protein, 274 aa, Staphylococcus epidermidis ATCC 12228
MNAYLAEFLGTAILILFGGGVCANVNLKRSAGNGADWIVIAFGWGLAVTMGVYAVGTFSGAHLNPAVTVALAMDGGFSWAQVPGYIVCQMLGGIVGGVFVWLMYLPHWKVTEDPAVKLGVFSTAPAIKNYFANFLSEIIGTMALTLGILFIGVNKIADGLNPIIVGSLIIAIGLSLGGTTGYAINPARDLAPRIAHAILPIHGKGKSNWSYAIVPVLGPMAGGMLGAIVYEVFYKQTFNFSCFIGLIVLIFTLILGVILNKISQNKNNDIESIY

SEQ ID NO: 19122 - protein, 297 aa, Bacillus subtilis subsp. subtilis str. 168
MRKKVRKAVIPAAGLGTRFLPATKAQPKEMLPIVDKPAIQYIVEEAAESGIEDILIITGRNKRSIEDHFDRSAELEFNLREKGKTETLKEMQQIADLANIHYIRQKEPLGLGHAVLCAEHFIGDEPFAVLLGDDIMVSETPALRQLMDVYDVYGTEVVGVQSVLPEDVSKYGIINTSGSQGHVYEVNDLVEKPSPEEAPSEIAVMGRYVLNSSIFSVLKTIGRGAGNEIQLTDALREVCRKEPIHARLLEGNRYDIGDKLGCFKASTEIGLMRPEMRSQLLAYLEDVIKRETKEMLR

SEQ ID NO: 19123 - protein, 470 aa, Nostoc punctiforme PCC 73102
MAKGDKINFSTPSGFPEFLPSEKRLELYLLDIIRRVFESYGFTPIETPAVERLEVLQAKGNQGDNIIYGIDPILPPNRQAEKDKSGETGKDKSGETGSEARALKFDQTVPLAAYIARHLNELIFPFARYQTDMVFRGERAKDGRFRQFRQCDIDVVARRELSLLYDAQMPAIITEIFEAINIGDFLIRINNRKVLTGFFKSVGITEDKIKSCINIVDNLEKIGESKVKQELEKEGVSGEQTQKIIDFIKIDGSVDEVLDKLKHLTLNLPETEQLSLGISELETVIAGVRNLGVTENRFCIDLSIARGLDYYTGTVYETTLLGHEALGSICSGGRYEELVGVFLGEKMPGVGISIGLTRLISRLLKAGILSTLAATPAQVMVVNMQEDLMPTYLKVSQHLRQAGINVITNFDKRPLGKQFQLADKQGIQFCVIIGSEEAAAQKSSLKDLKSGEQVEVLLVNLAEEVKRRLS

SEQ ID NO: 19124 - protein, 242 aa, Triticum aestivum
  unsure (1)..(242): unsure at all Xaa locations
MSLPPTDGGDDWFLDCGILEDLPAAACGAFPWDXASVSSSNPSAEVGSYVNNSDVPKDSGSNKRLRSEPCGRXPTSKACREKVRRDKLNDRFLELGTTLDPGKPVKADKAAILSDATRMVTQLRAEAXQLKDTNGSLEDKIKELKAEKDELRDEKQKLKLEKETLEHQMKLLTATPAYMPHPTMMPSPFAQAPXAPFHAQGQALGQKLMMPFVGYPGYPMWQLMPPSEVDTSKDSEACPPVA

SEQ ID NO: 19125 - protein, 160 aa, Bacillus cereus ATCC 14579
MTVYDFSAKTITGEEKSLKDYKGKALLIVNVASKCGFTPQYKGLQEVYDKYKDQGLEILGFPCNQFGGQEPGTEADITSFCELNYGVNFPMFAKVDVKGDKAHPLYTYMTEQAPGLLGMKAVKWNFTKFLIGKDGKVVGRFAPQTKPVDLEVEIEKVLGE

SEQ ID NO: 19126 - protein, 358 aa, Xanthomonas campestris pv. campestris str. ATCC 33913
MSQSKPLFPLNAWYAVAWDHEVKHALTPRKLCNLDVVLYRTTAGAVVALEDACWHRLVPLSMGKLRGDDVVCGYHGLVYNAQGRCVHMPSQETINPSACVRGFPVAEKHRYVWVWPGDPAQADVALIPDLHWSHDPAWAGDGRTIHAKCDYRLVLDNLMDLTHETFVHGSSIGQDEVAEAPFEVVHGDRTVTVSRWMHNIDPPPFWAGQIARHLNYHGKVDRWQIIHFEAPGTIAIDVGVAITGTGAPQGDRSQGVNGFVLNTITPETDTTCHYFWAFMRNYALHDQSLTTLTREGVTGVFGEDEAVLEAQQRAIEAHPDHAFYNLNVDAGGMWARRVIDRLIAREQRAGDLSLRMVG

SEQ ID NO: 19127 - protein, 477 aa, Oryza sativa
MSAAHLLRHSRKLRSLHNALDCERSGLVRYFSTASGSFPTKGNGAEKRIGGARFPQRKQPGKELETSKGNIARWLKKEGDKVSPGEVLCEVETDKATVEMECMEEGYLAKIIHGDGSKEIKVGEIIAVTVEEEGDIKKFKDYKPSTLAAPVAPSELKAQSEPTEPKVEEREPSKASELKAPRTEEPSRSGDRIFSSPLARKLAEDNNVPLSSVKGTGPDGRILKADIEDYLAKGCRKEALAAPGLSYTDVPNAQIRKVTANRLLSSKQTIPHYYLTVDTRVDNLIKLRGELNPLQESSGGKKISINDLVIKAAALALRKVPQCNSSWMNDFIRQYHNVNINVAVQTEHGLFVPVIRDADKKGLGMIAEEVKQLAQRARDNSLKPDDYEGGTFTISNLGGPFGIKQFCAIINPPQSAILAIGSAERRVIPGSANGQYEFGSFMSATMSCDHRVIDGAIGAEFLKAFKGYIENPTSMLL

SEQ ID NO: 19128 - protein, 654 aa, Geobacter sulfurreducens PCA
MAIRYIDEISELKDKKVFIRVDFNVPLDEHQNITEDTRIRAVLPTINFALDAGAKVVLASHLGRPKGERKPKYSMAPAAKRLSRLLGKEVLLAPDCIGSEVRQMIDAMKSGDIIMLENVRFYEGEEKNDENFARELANGCEIYVNDAFAVSHRAHASVEAITKFFPVVAAGFLMKNEMNYFEKAMQKPIRPLVAILGGAKVSGKLEVLESLLNKVDKIIIGGGMAFTFLKALGYNVGKSLVEEDLIETARSTYAKAREKGIKFYLPVDCVAADRFNPEAETKVTTIQEIPEEWMALDIGPATVALFTEALQSAKTIIWNGPMGVFEMDAFSRGTFAMVTAVANSYALTIVGGGDTDSAVHRAGEYAKISYISTGGGAFLELLEGKKLPRHQGAGRKRKIGGAAMRTPVIAGNWKLFKKRAEARELVNGLVSLVKDVQGVEIVVAPVFTVLAAVKGALDGSAIKLAGQDCFWEEEGAYTGEISPGMLVDAGCSHVIIGHSERRQYFGETDETVNRKIKAALKAGLAAIACIGESLAEREAGTTFDVLRTQLNGGLAGLSADDLKDVIIAYEPVWAIGTGKTATDAQAQEAHAFIRGVVSELLGKPAAEAVRILYGGSVKPENIKGLMTQPDIDGALVGGASLKADSFAAIASFSM

SEQ ID NO: 19129 - protein, 428 aa, Geobacter sulfurreducens PCA
MSEITDVYAREILDSRGNPTLEVEVFLESGVMGRAAVPSGASTGEREALELRDGDASRYLGKGVLKAVDNVNDIIAEQLIGMEATDQVGIDRRMLELDGTEYKSTLGANAILGVSLAVAKAAAEEVGLPLYQYIGGCNARELPLPMMNILNGGAHADNNVDIQEFMIMPAGARSFSEALRMGAEVFHALKSVLKGKGYNTAVGDEGGFAPNLKSNEEALEVIMEAIAKAGYKAGEDILLALDVASSELFKDGKYFLENEAKPEKTADELIDFYENLVNKYPIISIEDGMAENDWEGWKKITDRLGKRVQLVGDDLFVTNTKILKEGISKGVANSILIKLNQIGTLTETLDAIETAKRAGYTTVISHRSGETEDTTLADLAVAVNAGQIKTGSLCRTDRVAKYNQLLRIEDELDVTAQFRGKDVFYNLR

SEQ ID NO: 19130 - protein, 126 aa, Zea mays
  unsure (1)..(126): unsure at all Xaa locations
SQGWGERWETILLEGNQIGAVTQSVEAVXMSXRARGGVMASHRSGETEDTFIGGXGGGXSTGQIKTGAPCRAERLGKYNQRAXSEENXGVPGYPGQMQGPGSPVGGGEDFCSYTSLLPFVTMCRGR

SEQ ID NO: 19131 - protein, 242 aa, Zea mays
  unsure (1)..(242): unsure at all Xaa locations
MASLFKDPSKLSAYRDRRFKGTQEEYEAALLASTTLYIGNMSFYTTEEQAYELFSRAGEIKKIIMGLDKNSKTPCGFCFVLYYSREDAEDAVKYISGTMLDDRPIRVDFDWGFEEGRQWGRGRSGGQVRDEYRTDYDPGRGGYGKMVLRELEAQRELVDYGGSFQPNAPPPYERSERKRGHGDSHRNDRGDYQRKRYRNDDRSAPEESKRAPDSDPAEKNPRFREKGDSDEXEDDYDGKRRR

SEQ ID NO: 19132 - protein, 288 aa, Zea mays
MAHRQAVLAAVVLAALFPLALSRGLGLVHGHVRPHTHGLGLGHHHSQPHPHGRAPLAGGAWSSAHATFYGGGDASGTMGGACGYGNLYSQGYGTNTAALSTALFNNGLSCGACFEVRCDAAGGGSHSCLPGSVVVTATNFCPPNNALPSDDGGWCNPPRAHFDMSQPVFQRIALYRAGIVPVSYRRVACNKKGGIRFTINGHSYFNLVLVTNVGGAGDVHAVAVKAERSPGWQALSRNWGQNWQSNTLLDGQALSFRVTTSDGRSVLSNNAAPRGWSFGQTFSGAQFN

SEQ ID NO: 19133 - protein, 491 aa, Bacillus cereus ATCC 14579
MKIKAQVGMVMNLDKCIGCHTCSVTCKNTWTNRPGAEYMYFNNVETKPGIGYPKQWEDQEKYKGGWELKNGEIQLKSGSKMKRLMNIFHNPDQPTIDDYFEPWNYDYETLTNSPQRKHQPVARPKSAITGEFIDKIEWGPNWEDDLAGGHITGLQDPNVKKMEEEIKTDFENVFMMYLPRICEHCMNPSCVSSCPSGAMYKREEDGIVLVDQIACRAWRFCVSSCPYKKVYFNWQTNKAEKCTMCFPRIEAGMPTICSETCVGRIRYIGVMLYDADKVKEAASVEDKKDLYESQLTVFLDPNDPEVAAEAKKQGIPEEWIKAAQQSPIYKMIIDWKIALPLHPEYRTMPMVWYIPPLSPIMNMVEGKGSNWQAEEIFPAIDNMRIPIQYLANLLTAGDESHIRLTLKKMAVMRTHMRAMQINKEPNEAVLKELGLTKQDVEDMYRLLAIAKYKDRFVIPTSHREQVADLYSEQGSCGLAFAGGPGSCMTIS

SEQ ID NO: 19134 - protein, 187 aa, Griffithsia japonica
HEARSLRYASSAIRATASPRSLSTSASTSPQFTVTLFPGHGVGPEISVAVQNIFNAADVPIVWDEHHIDVDNAKPGQDLISADALDSLRRNRFGLKGPMATPIGKGYRSLNLTLRKALGLYANVRPCVSIPGVQTPYDDVDVVTVRENTEGEYSGLEHVVYPGVVESLKVITPERVNARVQVPFSII

SEQ ID NO: 19135 - protein, 130 aa, Zea mays
  unsure (1)..(130): unsure at all Xaa locations
HDATHPVAHCSGYSEEHCFSWIQGDAEALSFEDGSMDGYTITFGIRNVTHIEKALSEAYSXDGSKARVEVPMLGVESCGYRRRXNMLTRHVNLEPWQEKFAQMIQEAGFQRVEYENLLSGVVVIHSGLKL

SEQ ID NO: 19136 - protein, 376 aa, Aquifex aeolicus VF5
MTYLMNNYARLPVKFVRGKGVYLYDEEGKEYLDFVSGIGVNSLGHAYPKLTEALKEQVEKLLHVSNLYENPWQEELAHKLVKHFWTEGKVFFANSGTESVEAAIKLARKYWRDKGKNKWKFISFENSFHGRTYGSLSATGQPKFHKGFEPLVPGFSYAKLNDIDSVYKLLDEETAGIIIEVIQGEGGVNEASEDFLSKLQEICKEKDVLLIIDEVQTGIGRTGEFYAYQHFNLKPDVIALAKGLGGGVPIGAILAREEVAQSFTPGSHGSTFGGNPLACRAGTVVVDEVEKLLPHVREVGNYFKEKLKELGKGKVKGRGLMLGLELERECKDYVLKALEKGLLINCTAGKVLRFLPPLIIQKEHIDRAISVLREIL

SEQ ID NO: 19137 - protein, 1566 aa, Ustilago maydis
MSAATPTSPGFPLTMGTGVMAAHFAAPSSNAGSPRSRPTTPLSAGLTPSGPTYDDLGRWDDADVASWLNAARLGHYASIFAEHDIRGSVILDVDQAALKEMGITMVKDRVRISAAIKLLNKRCADSAVARRPSVVSISPLLPLASHPLYAHEGEIEYLQHDHTADPSADGSGSNFGLNSMGMRRGQMRPPPLTLKQSTSRGMPGYASPAGSINQSQGFGLSAARGLTPGAARGSVWNTASSSSATSKPGTPDGALHRKVNSIGGVAAPLAVGASSSLSSSRHPYGHAVHSNRPSTATGASGYSNVPASQSLRSNHTSSSPTATSFGSNINAASARPSTATGAQSYTTNVPGTSSARDGYSPLTPISESNSLGNTPTTPSGIQQQQQSAGYAVGRGPFASSQRYAASSVPSQQQPSSGHTLRHVDSGEGYNLAGYQNPNPPTLEDLKRRTIKFISEEDNTTRIVNVSDCRDAYDVMARVLKKFGKPPSGNSYTPTADQGPTGDELGATETWGIFATSADGQNTKALSDNELLAICHAPQPHDPLRERGLTLRRIPNHLPGEDARKVPVRSGRNKLEAFFGERMPVAQMQPAGPGSGVNADEEDAGSVTISGKKMKRASTVSIMSGLGVGPFSSSSHNTGAGHTHGSTRAEGKLLSKKESKHMSPPPVTSKPSKIRNFFGQRPPSELINTNLADFFPSTDSKALQRTARRSIYGRASASTRSKRNSTWSFVADPDAPPLPNKGSMDGHPTPLERSSISIRERGTTPVIQIGYDSRSEDDHQSNARRTSSGTHSHLHPSLTGPPTLPPVVSRDSLDEWSRDLKAVGSPVTEENAMFQSSRHGHASGSQQHHAAMKHYPSHASGYADRPSISRRASGESARSRRSLASQVRHGLSAARERNADTASLLTVDEITQEVENRRESISLAGAGGGWVVDEDGVPIPIPGSSSPFSSSAAASTRPSSGISSSYVHNGHLEHDDSEGHSDEEANQSSDLEEATRTRKARGVPSKAASIRTVASKRASSVLQAPGDESDRHLGDPMAVARSTTSRASSVSELRRSVHDHGDPSDGESGSDFTDSDLDSDGSETDEDEQANDVYLPSAKPAPIKWHKGALIGAGSFGNVFLGMNAKTGLLMAVKQVELPSGDSHLDQRKKGMLEALEREIKLLKSLEHENIVQYLDSFADDSHLNIFLEYVPGGSIVALLRNYGAFEEPLVRNFVRQILNGLSFLHNRGIMHRDIKGANILVDNKGGIKISDFGISKKVESDLVLATNKGGAGGGGAGGAAHRPSLQGSVFWMAPEVVKQTSYTIKADIWSLGCLVVEMISGTHPWAELNQMQALFQIGMGRKPSLPDEISNECRDFLEKTFELDYNNRPSADELLNHAFMGTEMTFPPSSGADGSGGGDDDAGGSGDAGDGDASTMGMTNDAETGTTRETRETKDGKRPTRSKSTRRLEREKRHKEAAAAAAAATALDTGTPNTPTSHTAAAAAAAAAASASASASASPAVASTSPAPGDAETGSPTNGKSAVPPAGSTGGTPESILTVSIATARGNSTSTALSAADAAFSEEADS

SEQ ID NO: 19138 - protein, 238 aa, Oceanobacillus iheyensis HTE831
MGKPSSKEERVHHVFENIYSKYDSMNSIISFQRHKSWRKDTMKRMNVQAGETALDVCCGTGDWSISLSEAVGQTGKVIGLDFSKNMLSIAKQKKQDLQLNQLELVHGNAMELPYEENSFDYVTIGFGLRNVPDYMTVLEEMYRVVKPGGKVVCIETSQPTLIGYRQAYYFYFKFIMPILGKLIAKSYKEYSWLQESAKDFPGKKELKEMFLNAGFDKVEMKSYTGGVAAMHMGFKASQ

SEQ ID NO: 19139 - protein, 454 aa, Oryza sativa
MHRSRLGLGGIAAAATAAGNGGATAGNVHRAAYIRKQRDHRSGLYRPWRGHHRKQVNLHDEEDREDAEEMIRCSQSQILSLSPKKSSLSLLPALHDCTQLLPMASVAATTFPSMARPAARGIVAGAAASTVPLPRAGVASPCPTARSLGFAARGTDPRLAIHVSSRRRAASASAGSRLARAVATMAKKSVGDLAAADLEGKRVLLRADLNVPLDASQNITDDTRVIAAIPTIKHLIGNGAKVILCSHLGRPKGITPKFSLAPLVPRLSELLGIQVQKADDVIGPEVEKSVSVLPNGSVLLLENVRFYKEEEKNDPEFAKKLASLADLYKELDYLVGAVSNPKRPFAAIVGGSKVSSKIGVIESLLEKCDILLLGGDVIVADKFAPEANCQAIAKKLAELSGKGVTTIIGGKDSVAAVEKVGVANVMSHISTGGGASLELLEGKELPGVVALDEA

SEQ ID NO: 19140 - protein, 203 aa, Listeria monocytogenes EGD-e
MSKIIIATANKGKAKEFEKIFAKFNIEVATLADFPEIGEIEETGTTFAENAALKAETVASVLNQTVIADDSGLIVDALDGAPGVYSARYAGVAHDDAKNNEKLLKNLEGVEPDKRTARFHCTLAVATPSEKTSFYTGEVEGVIAEQLCGTNGFGYDPLFFLPEFGLTMAEIPAEKKNEISHRANAIKQLEKDLVEVVEKVTKK

SEQ ID NO: 19141 - protein, 223 aa, Zea mays
PDQLNFLFRSSGLRFSNLYCDPLIIPGGHKITARQRWQPTPMQLQILESIFDQGNGTPSKQKIKEITAELSQHGQISETNVYNWFQNRRARSKRKQAAASLPNNAESEAEADEEPLADKKPKSDRPPPPPPPIQDNTKATGALSADRVSGGTRHLDTGHDQTSGVMYGCNDSGLLRSSGSSGQMSLYENFMSNPRIDRFPAKVESSRSFPHLQQHGEGFGMFG

SEQ ID NO: 19142 - protein, 214 aa, Paeonia delavayi
IVESVGEGVTDLKPGDHVLPVFTGECKECRHCKSEESNMCDLLRINTERGVMLSDGKSRFSINGQPIFHFIGTSTFSEYTVVHVGCVAKINPEAPLDKVCILSCGISTGLGATLNVAKPKKGSSVAIFGLGAVGLAAAEGARIAGASRIIGVDLNPKRFEEAKKFGVTEFVNPKDYDKPAQEVIAEMTDGGVDRSVECTGSIMAMVSAFECVHD

SEQ ID NO: 19143 - protein, 371 aa, Candida albicans SC5314
MSIPVSMKAIVFYAPYDVRTEERPTPKIKDPKDVIVKVRYSGLCGTDLHSYRGHIKGPVGTIIGHEFVGTVVATGDNITKFSIGDDVISNFSIECGECWYCKHGYSGQCNVTNTFGKVGLDGGQAEYVRVPYAETTLTKKPSTTNSNDDVDDSVYVLMADIFTTGYYGVKKIKDFLSISAAEGIKPQSFEETTILQLGAGPVGLCALRILKYFGFGKVVVVDNVPSRLEEAKRLGATKVINFETEPDGIKKYITEETDGVGFDAVLEVVGSAAAHKTSFDAVRRNGFISSIGMGHEPFPFNGLDVYLKNINMSFGRCHSWSLFPESLAIFEEMKGDLASFIDYKAKLEDSKEAFDMFDKHKVKKIVFDLTS

SEQ ID NO: 19144 - protein, 513 aa, Zea mays
  unsure (1)..(513): unsure at all Xaa locations
MMIARRLLRPNAPAQASSLLKHVMTGTASLQGYADSLLDATVRHFGSAPSAQPEENGFKGHGMLAPFTAGWQSNDLHPLIIERSEGSYVYDINGNKYLDSLAGLWCTALGGSEPRLVKAATEQLNKLPFYHSFWNRTTKPXLDLAQEILSMFTAREMGKXVFFTNSGSEANDSQVKLVWYYNNALGRPNKKKXLARSKAYHGIYHWFQRGLTGLPALHQKFDLPAPFVLHTDCPHYWRYHLPGETEEDFATRLATNLENLILKEGPETIAAFIAEPVMGAGGVIPPPKTYFDKVQAIVKKYDILFIADEVITAFGRLGTMFGCDYYNIKPDLVSLAKALSNAYVXPIGATLVSPEISDVIHSQSNKLGSFAHGFTYSGHPVACAVAIEALKLYRERDIPXHVKQIXPKFQDGIRALADSPIIGEIRGLGMIMGTEFTNNKSPTDLFPAEWGVGAIFGEECQKRGMLVRVAGDAIMMSPTLIMTPGEVDELVRIYGEALKATEERVAALQSKKN

SEQ ID NO: 19145 - protein, 642 aa, Arabidopsis thaliana
MSSTFRAPAGAATVFTADQKIRLGRLDALRSSHSVFLGRYGRGGVPVPPSASSSSSSPIQAVSTPAKPETATKRSKVEIIKEKSNFIRYPLNEELLTEAPNVNESAVQLIKFHGSYQQYNREERGGRSYSFMLRTKNPSGKVPNQLYLTMDDLADEFGIGTLRLTTRQTFQLHGVLKQNLKTVMSSIIKNMGSTLGACGDLNRNVLAPAAPYVKKDYLFAQETADNIAALLSPQSGFYYDMWVDGEQFMTAEPPEVVKARNDNSHGTNFVDSPEPIYGTQFLPRKFKVAVTVPTDNSVDLLTNDIGVVVVSDENGEPQGFNIYVGGGMGRTHRMESTFARLAEPIGYVPKEDILYAVKAIVVTQREHGRRDDRKYSRMKYLISSWGIEKFRDVVEQYYGKKFEPSRELPEWEFKSYLGWHEQGDGTWFCGLHVDSGRVGGIMKKTLREVIEKYKIDVRITPNQNIVLCDIKTEWKRPITTVLAQAGLLQPEFVDPLNQTAMACPAFPLCPLAITEAERGIPSILKRVRAMFEKVGLDYDESVVIRVTGCPNGCARPYMAELGLVGDGPNSYQVWLGGTPNLTQIARSFMDKVKVHDLEKVCEPLFYHWKLERQTKESFGEYTTRMGFEKLKELIDTYKGVSQ

SEQ ID NO: 19146 - protein, 643 aa, Desulfovibrio gigas
MCGIAGFVLLQDAPPVTDHQARDVLAAMAGRIAHRGPDGRGHHVGLPAAFAHCRLAIIDLSTGAQPMAAEDGAAVVTFNGEIYNYQEVRRELQALGRTFQTRSDTEVLLQAYLEWGVACLDRLEGMFAFALWDVRRRTLFAARDRFGKKPFFYTIQQGVFAFASELSALEAVPWAAFSIRASTLARFLAYEYVPTPESIYAEARKLPPAQYLELHEDGTLLVERYWETPMPRPEGSKGFGRADEPALCEELRRLLTQAVRRRLIADVPVGVFLSGGVDSSSVAAMAGQLAPGIKTFSIGFTEASYDESAYAGRVAAQLGTDHQLELLSADACADLLPEVVSRFDEPMADPSIVPTYLLSQITRRQVTVALGGDGPDELLAGYEYYPGFKATQYWERLPAWLRRAAVAASGLLPGSAGYVNPRHVAQTFLAAAEAPAWLRTQRMLTALTPEAQRALWKSPGDMLEPTRLFASTKRLWEALPDWPPMARVFHLFAQQITYGYILVKVDRCTMLHGLEARAPFLDRDLAEFCFRLPVSMKLRGATRKYLLKEAMAGLLPQDILHRPKRGFLIPTAAWLRGRLRPLVDDLLHERRLREQGLFHPAAVRRLVEEHASGKKDHRKGLWTMLVLQLWLAGKPAVRIDPER

SEQ ID NO: 19147 - protein, 572 aa, Salmonella typhimurium
MSMSEKHPGPLVVEGKLSDAERMKLESNYLRGTIAEDLNDGLTGGFKGDNFLLIRFHGMYQQDDRDIRAERAAQKLEPRHAMLLRCRLPGGVITTTQWQAIDKFAADNTIYGSIRLTNRQTFQFHGILKKNVKPVHQMLHSVGLDALATANDMNRNVLCTSNPYESQLHAEAYEWAKKISEHLLPRTRAYAEIWLDQEKVATTDEEPILGQTYLPRKFKTTVVIPPQNDIDLHANDMNFVAIAENGKLVGFNLLVGGGLSIEHGNKKTYARTASEFGYLPLEHTLAVAEAVVTTQRDWGNRTDRKNAKTKYTLERVGLETFKAEVERRAGIKFEPIRPYEFTGRGDRIGWVKGIDDKWHLTLFIENGRILDYPGRPLKTGLLEIAKIHQGEFRITANQNLIIASVPESQKAKIETLARDHGLMNAVKPQRENSMACVSFPTCPLAMAEAERFLPSFTDKVEAILEKHGIPDEHIVMRVTGCPNGCGRAMLAEIGLVGKAPGRYNLHLGGNRIGSRIPRMYKENIAEPDILASLDELIGRWAKEREAGEGFGDFTVRAGIIRPVLDPARDFWE

SEQ ID NO: 19148 - protein, 366 aa, Triticum aestivum
  unsure (1)..(366): unsure at all Xaa locations
PPPTCDLAHGRWVFDNESLPLYREKECNFLTKQLTCLANGRNDDLWQYWQWQPNNCSLPTFDARRFMERMRGKRLMFVGDSLNRNQFYSLVCMVQSILSKGRKKVVKRGSNTIFHAKEYRATLEFYWAPFLVESNSDDPNIHSIEHRIIRPERIEGHAQYWRGVDYLIFDTYIWWMNTADIKVRRPDSRSWSEHDEVPRIEAYGRVLKTWSDWLNENIDPARTSVFFMTISPIHISPDKWGNPXGIKCAKETLPVLNYTEPLDLNHDMRLYDMVASTARSMKKVPVTLIDITRMSDYRKDAHTSVYSVRRGYLLTPKQKNDPEKFADCIHWCLPGVPDVWNTVLYTRIFSKSPPSSPPALALPPPQ

SEQ ID NO: 19149 - protein, 463 aa, Bacillus subtilis subsp. subtilis str. 168
METSQEPLVTQKKSKPSVWRSMSLFLVPLLLSNVLQSVGQLVGMMAVGRWLGVDAVAAVSSFFPLFFLLISFTIGIGSGSSILIGQAYGAKNEERLKAVVGTTLTFTFLLGVVLAVIGSIFTLDILRLMGTPENVIHVSANYARILFYAMPFMFLYFAYTTFLRGTGDSKTPFYTLIVSTVINIALLPVLILGMFGFPKLGIYGSAYATVISTIATFLVLMVYLRKRKHPLQFDKTVRRYLKMDKELLVLLLRLGVPASINMILVSLSEIAVISFVNHYGSNATAAYGVVNQVASYVQMPAVSLGIAVSIFAAQSIGANEFDRLKQVIRVGIWLNYIIGGVLIILIYVFSHQILSLFLTEQESLYIAHRLLMTTLWSYLLFGNAQIISATMRASGTVLWPTVISIFAIWGVEVPVAFVLSHYTKLEILGVWVGYPAAFAVSLLLIYGYYQFVWKKKQITRLIQ

SEQ ID NO: 19150 - protein, 381 aa, Thermosynechococcus elongatus BP-1
MKAMILAAGKGTRVRPITYTIPKPMIPILQKPVMEFLVELLRQHGFNQIMVNVSHLAHEIESYFQDGQRFGVEIAYSFEGYIKDGELVGKALGSAGGIKRIQDFNPFFDDTFVVLCGDALIDLDLTAAVAWHRQKGAIATVVMKTVPREDVSSYGVVVTDKSDRIVAFQEKPSVEEALSNHINTGIYIFEPEVIDYIPSNQEYDIGSQLFPKLVEMGAPFYGLAMDFEWIDIGKVPDYWQAVRGVLNGTIKNVSIPGHEQFPGIYTGLNVAVNWDKVTIQGPVYIGGMTKIEDGATIIGPTMIGPNCHICSGAVVDNCVIFEYSRLGSDVRLVDKLVFGRYCVDKTGTTIDLKAAALDWLITDSRQTDIQLSPLELKEMMS

SEQ ID NO: 19151 - protein, 214 aa, Paeonia brownii
IVESVGEGVTDVKPGDHVLPIFTGECKECRHCKSEESNMCDLLRINTDRGVMLNDGKSRFSINGQPIFHFVGTSTFSEYTVLHVGCLAKINPEAPLDKVCVLSCGISTGLGATLNVAKPKKGSTVAIFGLGAVGLAAAEGARIAGASRIIGVDLNPKRFDEARKFGVTEFVNPKDYNKPVQEVIAEMTGGGVDRSVECTGSVMAMMSAFECVHD

SEQ ID NO: 19152 - protein, 214 aa, Paeonia californica
IVESVGEGVTDVKPGDHVLPIFTGECKECRHCKSEESNMCDLLRINTDRGVMLNDGKSRFSVNGQPIFHFVGTSTFSEYTVLHVGCLAKINPEAPLDKVCVLSCGISTGLGATLNVAKPKKGSTVAIFGLGAVGLAAAEGARISGASRIIGVDLNPKRFDEARKFGVTEFVNPKDYNKPVQEVIAEMTGGGVDRSVECTGSVMAMMSAFECVHD

SEQ ID NO: 19153 - protein, 214 aa, Paeonia lutea
IVESVGEGVTDVKPGDHVLPIFTGECKECRHCKSEESNMCDLLRINTDRGVMLNDGKSRFSINGQPIFHFVGTSTFSEYTVLHVGCLAKINPEAPLDKVCVLSCGISTGLGATLNVAKPKKGSTVAIFGLGAVGLAAAEGARIAGASRIIGVDLNPKRSDEARKFGVTEFVNPKDYNKPVQEVIAEMTGGGVDRSVECTGSIMAMMSAFECVHD

SEQ ID NO: 19154 - protein, 214 aa, Paeonia delavayi
IVESVGEGVTDVKPRDHVLPIFTGECKECRHCKSEESNMCDLLRINTDRGVMLNDSKSRFSINGQPIFHFVGTSTFSEYTVLHVGCLAKINPEAPLDKVCVLSCGISTGLGATLNVAKPNKGSTVAIFGLGAVGLAAAEGARIAGASRIIGVDLNPKRFDEARKFGVTEFVNPKDYNKPVQEVIAEMTGGGVDRSVECTGSIMAMMSAFECVHD

SEQ ID NO: 19155 - protein, 416 aa, Vibrio vulnificus YJ016
MDIFKSINGHFTKLNPMYYQSNKQNKRQTGNTMEIARSLQQIQSSYIREILAAASDPSVISLAGGLPDEQTFPIELMKPTLEKLSEMPQVFQYGATAGYAPLLNFLKTYMSLPETHMAMACTGSQQGLDLIARAYINPGDTVVMEAPSYLGAMQVFGLVSANIATVSQTEAGPNLDELEACFKQHSPKMFYAVPDFHNPTGVCWSLETRKQVAKLCIEHKVAFIEDAPYRELRFQGEALPLVSDFCPQDSIVLRSFSKIASPGLRIGIVTGKVSYLEPLIKVKQGADLHSSVPMQALLLGLLEHEKFPEHMEKIRTLYQSRYQVLAEALQTQLPESCQLKSVDGGMFVWVTLPECDTFALAKSLLGNGVAVVPSPVFYPAEQKAQAALRLNFTNATPEQLKEAVTRLAEGLKLALV

SEQ ID NO: 19156 - protein, 214 aa, Paeonia suffruticosa subsp. spontanea
IVESVGEGVTDVKPGDHVLPIFTGECKECRHCKSEESNMCDLLRINTDRGVMLNDGKSRFSINGQPIFHFVGTSTFSEYTVLHVGCLAKINPDAPLDKVCVLSCGISTGLGATLNVAKPKKGSTVAIFGLGAVGLAAAEGARIACASRIIGVDLNPKRFDEARKFGVTEFVNPKDYNKPVQEVIAEMTGGGVDRSVECTGSIMAMMSAFECVHD

SEQ ID NO: 19157 - protein, 564 aa, Zea mays
MAAAAVTSNGGAVAANGPAPGRLASVYSEVQTNRLLHTLPLPSVLRSNFSVVDGPASSAAGNPDEIAKLFPNLFGQPSASLVPSAEPAATRPLKVGVVLSGGQAPGGHNVICGIFDYLQERAKGSTLLGFKGGPAGIMKCKYVELTSDFVYPYRNQGGFDMICSGRDKIETPEQFKQAEDTANKLDLDGLVVIGGDDSNTNACLLGEYFRSRNLKTRVIGCPKTIDGDLKCKEVPTSFGFDTACKIYSEMIGNVMTDARSTGKYYHFVRLMGRAASHITLECALQTHPNAALIGEEVAAKKETLKNVTNYITDIICKRADLGYNYGVILIPEGLIDFIPEVQKLIAELNEILAHDVVDEAGAWKSKLQAESRELFEFLPKTIQEQLMLERDPHGNVQVAKIETEKMLISMVETELEKRKAEGRYSAHFRGQAHFFGYEGRCGLPTNFDSNYCYALGYGAGALLQSGKTGLISSVGNLAAPVEEWTVGGTALTSLMDVERRHGKFKPVIKKAMVELDAAPFKKYASLRDEWAIKNRYISPGPIQFSGPGSDDSNHTLMLELGAEL

SEQ ID NO: 19158 - protein, 528 aa, Saccharomyces cerevisiae
MSYNNGNTYSKSYSRNNKRPLFGKRSPNPQSLARPPPPKRIRTDSGYQSNMDNISSHRVNSNDQPGHTKSRGNNNLSRYNDTSFQTSSRYQGSRYNNNNTSYENRPKSIKRDETKAEFLSHLPKGPKSVEKSRYNNSSNTSNDIKNGYHASKYYNHKGQEGRSVIAKKVPVSVLTQQRSTSVYLRIMQVGEGTYGKVYKAKNTNTEKLVALKKLRLQGEREGFPITSIREIKLLQSFDHPNVSTIKEIMVESQKTVYMIFEYADNDLSGLLLNKEVQISHSQCKHLFKQLLLGMEYLHDNKILHRDVKGSNILIDNQGNLKITDFGLARKMNSRADYTNRVITLWYRPPELLLGTTNYGTEVDMWGCGCLLVELFNKTAIFQGSNELEQIESIFKIMGTPTINSWPTLYDMPWFFMIMPQQTTKYVNNFSEKFKSVLPSSKCLQLAINLLCYDQTKRFSATEALQSDYFKEEPKPEPLVLDGLVSCHEYEVKLARKQKRPNILSTNTNNKGNGNSNNNNNNNNDDDDK

SEQ ID NO: 19159 - protein, 168 aa, Glycine max
  unsure (1)..(168): unsure at all Xaa locations
MIYSPSVTTVNRAGADMGATFTDLNSMAGFPIIKTNNDITSIDTNNGRXQCIQVWPPIGNKKFETLSYLPYLDDAQLAKEVEYLLKKGWIPCLEFKSEHGFLCREHNKTPGYYYRRYCTMWKLPIEGCTDANNVVEEDKHDKTAXPNWLISIFRNDNEMQVHCISVNY

SEQ ID NO: 19160 - protein, 341 aa, GIBBERELLA ZEAE PH-1
MPQQLIGSEYTVYRSGDGNGGFTPTTVKVTTLGPHDILVRITHSGVCHTDITFCQMGAPIALGHEGVGIVEAVGSLVTQFNVGDRAGGGFHRDACGHCKYCLSGKDIYCYNRVIFGEGDFDNGTFGKYYIGKETYLHKIPEGLASEHAAPLQCAGATVYAALKATVTPEKRVGILGIGGLGHLAIQYANKMGADVIIYSTSTSKETEARQLGAKEFHLLDNMFDDVKAPIDVLVICGTKYPDWDRVMAKEFLARDGVIVPLAAPVHGPLSLPAGAMFFQGYHVFSSLVGSRNVHDEMLEFSARHGIKPMVQIFKHEGAETIREVFELVQMNKMRYRAVLEM

SEQ ID NO: 19161 - protein, 390 aa, Oryza sativa (japonica cultivar-group)
MSRRQEICRNFQRGSCKYGAQCRYLHASPHQQQQQQQAKPNPFGFGTGSRQQQQPSFGSQFQQQQQQQQKPNPFGFGVQGANAQSRNAPGPAKPFQNKWVRDPSAPTKQTEAVQPPQAQAAHTSCEDPQSCRQQISEDFKNEAPIWKLTCYAHLRNGPCNIKGDISFEELRAKAYEEGKQGHSLQSIVEGERNLQNAKLMEFTNLLNSARPSQTPSFPTMSSFPEVKNNSSFGASQTNGPPVFSSFSQIGAATNIGPGPGTTAPGMPASSPFGHPSSAPLAAPTFGSSQMKFGVSSVFGNQGSGQPFGSFQAPRFPSSKSPASSVQHRDIDRQSQELLNGMVTPPSVMFEESVGNNKNENQDDSIWLKEKWAIGEIPLDEPPQRHVSHVF

SEQ ID NO: 19162 - protein, 259 aa, Arabidopsis thaliana
MPQGDYIDLHRKRNGYRLDHFERKRKKEAREVHKHSTMAQKSLGIKGKMIAKKNYAEKALMKKTLKMHEESSSRRKADENVQEGAVPAYLLDREDTTRAKVLSNTIKQKRKEAGKWEVPLPKVRPVAEDEMFRVIRSGKRKTKQWKRMVTKATFVGPAFTRKPPKYERFIRPSGLRFTKAHVTHPELKCTFCLEIIGIKKNPNGPMYTSLGVMTRGTIIEVNVSELGLVTPAGKVVWGKYAQVTNNPENDGCINAVLLV

SEQ ID NO: 19163 - protein, 464 aa, Magnaporthe grisea 70-15
MFAPILRRRALQKTSSLRYVTPALTRWYASYPPHTVVKMPALSPTMTAGNIGAWHKKPGDGIAPGDVLVEIETDKAQMDFEFQEEGVLAKVLKETGEKDIAVGNPIAVLVEEGTDVKAFENFTLADAGGEAPASSPPKEEKNVEESSKAASTPTPTPAPEPENTKSAGRLQNALDREPNAEPAAKRLANEKGIKLDGVKGSGKNGKITAEDVKKLGSSGPAAAAAAGPAGALYEDIPISNMRKTIANRLKESVSENPHYFVSSSLSVSKLLKLRQALNSSSEGKYKLRVNDFLIKAIAVASKKVPQVNSSWRDGVIRQFNTVDVSVAVSTPSGLITPIVKAVETKGLESISASVKELAKRARDNKLKSDEYQGGTISISNMGMNTAVERFTAVINPPQAAIVAIGTTKKVAVPVENEDGTTGVEWDDQIVITGSFDHKVVDGAVGAEWMKELKTVVENPLQLLL

SEQ ID NO: 19164 - protein, 410 aa, Magnaporthe grisea 70-15
MSAEAGSSSDQSVTQKTPKTVRAVFHDAVGKVSVRHVPFPELKEPEDAIVRITTSAICGSDLHNYRGFYGPENYPYRAGHEAMGVVHKIGPAVDSLKVGDRVVIAFPDDHPIRTENTTVPDIDFFFDPEFGLQTEYARVPFADSSLIPIPNRLPDKEWLFLGDIFTTGWMVLNGAGFEAGDSVAVFGAGPVGLMAAYSACIRGASRIYVVDHVQQRLDKAREIGPGVVPIDFTKPGQSASEQILALDGGGVNRAVDCVGQECLNRELVVQQDYVLRECVAVTAAGGGVGVAGVHIVLPPAPGRPNVGQVQPEILFGFPEFWLRGLKLGAVLADPAKMAPTLSRLVDAGRARPGFIVDEGPFDLDEAPELYRRFNEQKIIKVLFKGAPRPEEWEEWEKDEVLEDFKKVNGH

SEQ ID NO: 19165 - protein, 330 aa, Glycine max
  unsure (1)..(330): unsure at all Xaa locations
TTVEKIRDTSFSPSWPSGEGVLTFSFVKDAMELPFLNAYLDSLGLRNFKTVCYFAHAYTTILTAKASSLCRYSFEVPVSQSLQFKARALELIAEXGRKFDKYVPDENFFEKGLYMFDIGQNDLAEAFDSKILDQILASIPTILLELEKGIKNLYDQGARYFWIHNTGPLGCLPQNIAKFGTDSSKLDELGCVSSHNQAAKTFNLQLHALCTKLQGQYPDSNVTYVDIFTIKSNLISNFSRYGFEQPIMACCGYGGPPLNYDSRVSCGETKTFNGTTITAKACNDSSEYISWDGIHYTETANQYVASQILTGKYSDPPFSDKMPFLLKLKF

SEQ ID NO: 19166 - protein, 293 aa, Fusobacterium nucleatum subsp. nucleatum ATCC 25586
MNKILMAEVNISEGTNLELIEKVKKSFIDEKNIEIVDIDSNVDHNRTVFTYKGEPSAVLNATKKLAKCAVDLIDMRNHKGSHPRMGAVDVVPFIPVKNITTEEAVEIAKEFGKYLGEQGVPVYFYEDAQEKEYRKTLPSIRKGQYEALEEKMKDPKWAPDEGPKEFNPKSGGTVTGARFPLVAFNINLDTYNLEIGKKIVKAVRSATGGYSCIRAIALELEEKKQIQVSMNMINYEKTPIHRVFETIKSEANRYNVNIVDTELVGPVPIYALRDVLDFYLRIADSFSLDQIYF

SEQ ID NO: 19167 - protein, 297 aa, Escherichia coli
MMNLKAVIPVAGLGMHMLPATKAIPKEMLPIVDKPMIQYIVDEIVAAGIKEILLVTHASKNAVENHFDTSYELESLLELRVKRQLLAEVQSICPPGVTIMNVRQGEPLGLGHSILCARPAIGDNPFVVVLPDVVIDDASADPLRYNLAAMIARFNETGRSQVLAKRMPGELSEYSVIQTKEPLDREGKVSRIVEFIEKPDQPQTLDSDIMAVGRYVLSADIWPELERTQPGAWGRIQLTDAIAELAKKQSVDAMLMTGDSYDCGKKMGYMQAFVKYGLRNLKEGAKFRKGIEKLLSK

SEQ ID NO: 19168 - protein, 263 aa, Gloeobacter violaceus PCC 7421
MNLGIVGGGAMAEALIAGLIAGAVYAPSEIAVSDPVAERGEWLHRRYGVVAVTDNLVPAAAPTLLLAVKPQAFAVVSNQVAAHVRSELVVSILAGVPLARLQAAFTGRAVVRAMPNTPALVRSGITALSRSERVTPEQFAVARTLFACVGEVVEVPESAMDAVTGLSGSGPGYLALVVEALIDGGVAAGLPRATASQLVLATLRGSAELLIQEKLHPAVLKDRVTSPGGTTIAGIEQLEGRSVRGAFIEAVQAATRRARELSG

SEQ ID NO: 19169 - protein, 586 aa, Brassica oleracea
MCGILAVLGCSDDSQAKRVRVLELSRRLRHRGPDWSGIYQNGFNYLAHQRLAIIDPDSGDQPLFNEDKSIVVTVNGEIYNHEELRKGLKNHKFHTGSDCDVIAHLYEEHGENFVDMLDGIFSFVLLDTRDNSFMVARDAVGVTSLYIGWGLDGSLWVSSEMKGLHEDCEHFEAFPPGHLYSSKSGGGFKQWYNPPWFNESVPSTPYEPLAIRSAFEDAVIKRLMTDVPFGVLLSGGLDSSLVASITARHLAGTKAAKRWGPQLHSFCVGLEGSPDLKAGKEVAEYLGTVHHEFHFTVQDGIDAIEDVIYHVETYDVTTIRASTPMFLMSRKIKSLGVKMVLSGEGSDEIFGGYLYFHKAPNKQEFHQETCRKIKALHKYDCLRANKATSAFGLEARVPFLDKEFINTAMSLDPESKMIKPEEGRIEKWVLRRAFDDEERPYLPKHILYRQKEQFSDGVGYSWIDGLKAHAAENVNDKMMSKAAFIFPHNTPLTKEAYYYRMIFERFFPQNSARLTVPGGATVACSTAKAVEWDASWSNNMDPSGRAAIGVHLSAYDGSKVALPLPAPHKAIDDIPMMMGQEVVIQT

SEQ ID NO: 19170 - protein, 420 aa, Podospora anserina
MVYRGLRLAARAAPKFALYNNNTALRQLPLQFQHVRTYADKIVKVPQMAESISEGTLKQWNKSVGDFVEQDEEIATIETDKIDVAVNAPEAGVIKEFLANEEDTVVVGQDLVRIELGGAPSGDKPAAEPKESAPEKKAEPEKAPEPKQEESKPAASAPPPPKQETPEPKSKPAPAAAPEKPATLGNREEKRVKMNRMRLRIAERLKQSQNTAASLTTFNEVDMSALMEFRNKYKEEVLKKTGVKLGFMSAFSRAAVLAMRDIPAVNASIEGPNGGDTIVYRDYVDISVAVATEKGLVTPVVRNAEAMDLVGIERSIAELGKKARDGKLTIEDMAGGTFTISNGGVFGSLMGTPIINLPQSAVLGLHATKERPVVVNGKIEIRPMMYLALTYDHRLLDGREAVQFLVKVKEYIEDPRKMLL

SEQ ID NO: 19171 - protein, 214 aa, Paeonia szechuanica
IVESVGEGVTDVKPGDHVLPIFTGECKECRHCKSEESNMCDLLRINTDRGVMLNDGKSRFSINGQPIFHFVGTSTFSEYTVLHVGCLAKINPEAPLDKVCVLSCGISTGLGATLNVAKPKKGSTVAIFGLGAVGLAAAEGARIAGASRIIGVDLNPKRFDEARKFGVTEFVNPKDYNKPVQEVIAEMTGGGVDRSVECAGSIMAMMSAFECVHD

SEQ ID NO: 19172 - protein, 539 aa, Arabidopsis thaliana
MAYASRIINHSKKLKDVSTLLRRENAATIRYYSNTNRAPLNREDTFNSRLGYPPLERISICSTSTLPVSIIFSTTRSNLSSAMGRPIFGKEFSCLMQSARGFSSGSDLPPHQEIGMPSLSPTMTEGNIARWLKKEGDKVAPGEVLCEVETDKATVEMECMEEGYLAKIVKAEGSKEIQVGEVIAITVEDEEDIGKFKDYTPSSTADAAPTKAEPTPAPPKEEKVKQPSSPPEPKASKPSTPPTGDRVFASPLARKLAEDNNVPLSDIEGTGPEGRIVKADIDEYLASSGKGATAKPSKSTDSKAPALDYVDIPHSQIRKVTASRLAFSKQTIPHYYLTVDTCVDKLMALRSQLNSFKEASGGKRISVNDLVVKAAALALRKVPQCNSSWTDDYIRQFKNVNINVAVQTENGLYVPVVKDADRKGLSTIGEEVRLLAQKAKENSLKPEDYEGGTFTVSNLGGPFGIKQFCAVVNPPQAAILAVGSAEKRVVPGNGPDQFNFASYMPVTLSCDHRVVDGAIGAEWLKAFKGYIENPKSMLL

SEQ ID NO: 19173 - protein, 214 aa, Paeonia rockii
IVESVGEGVTDVKPGDHVLPIFTGECKECRHCKSEESNMCDLLRINTDRGVMLNDGKSRFSINGQPIFHFVGTSTFSEYTVLHVGCLAKINPEAPLDKVCVLSCGISTGLGATLNVAKPKKGSTVAIFGLGAVGLAAAEGARIAGASRIIGVDLNPKRFDEARKFGVTEFVNPKDYNKPVQEVIAEMTGGGVDRSVECTGSIMAMMSAFECVHD

SEQ ID NO: 19174 - protein, 503 aa, Gossypium hirsutum
MAVQVPSRQLFIDGEWREPILKERLPTINPATEEIIGNIPAATAEDVELAVAAARRALSRNKGKDWATAPGAVRAKYLRAIAAKVTERKTELAKLEAIDCGKPLDEAVWDIEDVAGCFEYYADLAEGLDARQKAPVSLPMETFKSYVLKEPIGVVGLITPWNYPLLMATWKVAPSLAAGCAAILKPSELASITCLELAKVVKGSRLPPGVLNILAGLGPEAGAPLASHPDVDKIAFTGSSATGSKIMAAAAQMVKPVSLELGGKSPIIVFEDVDLDKAAEWTAFGCFWTNGQICSATSRLIVHENIAREFLDRLVKWTKNIKISDPFEEGCRLGPVVSGGQYEKVLKFISTAKSEGATILSGGVRPEHLKKGFFVEPTIITDVTTSMQIWREEVFGPVLCVKTFRTEEEALELANDTHYGLGAAVISNDLERCDRVSKNLQAGIVWVNCSQPCFCQAPWGGNKRSGFGRELGEWGLDNYLSVKQVTQYVSDEPWGWYRSPSKL

SEQ ID NO: 19175 - protein, 171 aa, Zea mays
MGFPAGYSYLVLGKQLLHILLLLGYVRRFLLWAFDAVGLGDLLVIGDDHQAPPPPQQPQPQQHRRAEFRAAMPAMVIEEALPVARFDELEARVVGGDCAVCLGGIGGGDEVRRLGNCRHAFHRACLDRWMEHDQRTCPLCRAPLVPGALWPADASDLDFSYLGAPVPSPTL

SEQ ID NO: 19176 - protein, 434 aa, Streptococcus pneumoniae
MSIITDVYAREVLDSRGNPTLEVEVYTESGAFGRGMVPSGASTGEHEAVELRDGDKSRYGGLGTQKAVDNVNNIIAEAIIGYDVRDQQAIDRAMIALDGTPNKGKLGANAILGVSIAVARAAADYLEIPLYSYLGGFNTKALPTPMMNIINGGSHSDAPIAFQEFMILPVGAPTFKEALRYGAEIFHALKKILKSRGLETAVGDEGGFAPRFEGTEDGVETILAAIEAAGYVPGKDVFLGFDCASSEFYDKERKVYDYTKFEGEGAAVRTSAEQIDYLEELVNKYPIITIEDGMDENDWDGWKALTERLGKKVQLVGDDFFVTNTDYLARGIQEGAANSILIKVNQIGTLTETFEAIEMAKEAGYTAVVSHRSGETEDSTIADIAVATNAGQIKTGSLSRTDRIAKYNQLLRIEDQLGEVAEYRGLKSFYNLKK

SEQ ID NO: 19177 - protein, 214 aa, Paeonia rockii
IVESVGEGVTDVKPGDHVLPIFTGECKECRHCKSEESNMCDLLRINTDRGVMLNDGKSRFSINGQPIFHFVGTSTFSEYTVLHVGCLAKINPEAPLDKVCVLSCGISTGLGATLNVAKPKKGSTVAIFGLGAVGLAAAEGARIAGASRIIGVDLNPKRFDEARKFGVTEFVNPKDYNKPVQEVIAEMTGGGVDRSVECTGSIMAMMSAFECVHG

SEQ ID NO: 19178 - protein, 460 aa, Ferroplasma acidarmanus
MSEYDLAIIGWGAAGFAAAIKASELTSNQMKIALIGTGPIGGTCVNVGCVPSKFLIEASKNYKEATKPSYRGITANANINFSEFMESLNDFVSTERNTKYADVIKNFENIDMYEGMAKFIDNNTVAVNNKDIKALNFIISTGSRTLIPEIKGLTDYYTSDTIWNMRELPGKIAVLGSGEVALELAYAFSNFGTEVHIFNRSNRILKGFDEDINNHLINALKTNGIIFHLGQNFQEIINKNGKKSIVTEAGTFDNFDSLLVATGRVPQIDKLNLKAAGISTDNGIVVDDSLKTTNPIIYAAGDCIRQSLKLETLAGKEGVIAVENMLGGSRTINMHEVPWVVFTEPNVASVGYTEAELKSKNIEYDVRTVELKNVVKANILNSYDGIAKVISGKDKKILGVHVVAPMAAEFIIEGVYLIQNGLTYDNLINAMHVFPTVAESIKIGGQAFIRDISKMSCCMD

SEQ ID NO: 19179 - protein, 823 aa, Oryza sativa (japonica cultivar-group)
MPAQKRPAPEAASAPAGGDGHVEGGGAGGGGGADEDAHRGGERSPKVMNGGGPEKEKERRDADSDAEEEEEEAGGGGGGGGADEDRDSPSSESDGDMDEFILVKLMDIRKEVQCPICLGIIRKTRTVMECLHRFCRDCIDKSMRLGNNECPACRTHCASRRSLRDDPNYDALILALYPDIDKYEEEIQASIAETFRRQSEALVKKRSVAKATGSTITRRTRGNMRAKRRGRTSSPDIVATDNEDEDRDENGNEGSKESSSVDDRSPDVRQKRVRRWPVPRSSPAKSIGGIDSSFEDIDDLGSGRDIMSTSPLRGEMLAWGKNGTRSQTRHGNSGGSSGRMAKGGRVTKLVEYLRNTDEFDNKFNLYLVLLPLNGQSMPKLEKPYLSCQPTFSVRHLCQFVALQLSRHAKEVEIFIRKNPNNGCFASIDTSADEIKLNHDALERLEEEKSLSELYPSLASGHGDLAPWTRYGALNNEQMVGCRKNREVIKLLLTGAGLTVCHAMLPLKLADWPSTLTQSRCQSNWPMSLEVLSESLLCFGATSVTVDDIAAAGNLDEITITSIFAHGEDVGSCVSSAASSAGLEYNPVYESSVGKQCDWVTVVQETYESTKVIDGLWVIPKWRTPPDPQAINIIINPGLAFGTGEHPTTKLCLLLLRETVKGGERFLDYGTGTGVLGIAALKMGAALSNGIDIDPQAVTSACENMMLNGIDSNKMLVYLVPTNAQSACFPSNIDKSEENRPTGNLELKSSKGSYDIVAANILLNPLLELVEDIVGYAKSGGIVAVSGILSEQVPKVEEAYSRYLENISVSEIDGWACLRGNRRA

SEQ ID NO: 19180 - protein, 270 aa, Oryza sativa
VAAAAAAVQKQMTLLQKADADVSSLVDNFPALINIARVNDPPARITQEAFHMDMRGSRMVHSAESLLKLVSELKRTAIFSGLASLTENVDRRIEIFSQQVEGTERMLERIGQEAAGSLRELEAHYYSSVVRTPPDEWAHPSSSPSYNRILWSPWPTSSGPVAPRFLRPRPVERHRGGRVPRGPDGPAFPAVPPSPSLVERKKIRSTQRRNERGRCGGDGCTARRDSDATATARSLLRQLTPPVVTFSPALGGSLRGWWFRYRVNEQTCTR

SEQ ID NO: 19181 - protein, 214 aa, Paeonia tenuifolia
IVESVGEDVTDVKPGDHVLPIFTGECKECRHCKSEESNLCDLLRINTDRGVMLNDGKSRFSINGQPIFHFVGTSTFSEYTVLHVGCLAKINPEAPLDKVCVLSCGISTGLGATLNVAKPKKGSTVAIFGLGAVGLAAAEGARIAGASRIIGVDLNPKRFDEARKFGVTEFVNPKDYNKPVQEVIAEMTGGGVDRSVECTGSIMAMMSAFECVHD

SEQ ID NO: 19182 - protein, 583 aa, ASPERGILLUS NIDULANS FGSC A4
MEEQYAALASKITSLATSHQKPRYLVAVAGAPGSGKTTLATAVAAQINRSGLLSHKSTNQSDDNSQTNEIAKRALVLSMDGFHLPRSELDTLPNKERTEAYVRRGAPWTFDIPAFLEFMRTLRLWADSGSPSSSSEETAGVLYAPTFSHSTKDPIPNSIVIDHTTSIVIIEGNYLLLDKPQWRDIAPLVDYRVFVDVDLAEARERLAQRHVEAGIEQTLEEGFLRVDRNDAINGALVKGHVVDGVDIVLRKKETNPSFVLRAVKDVAFEDRVIPPLKDPWDVRVQVAQTGICGSDVHYWQRGRIGDFILESPIVLGHESSGIVTEIGSAVKNLKVGQKVAIEPGVPCRHCDYCRSGSYNLCPDTVFAATPPHDGTLQKYYITQADYCYPLPYHMGLEEGAMVEPVAVAVQITKVGNVRPNQTVVVFGCGPIGLLCQAVSKAYACKKVIGVDISQSRLDFAQAFGADGVFLPPPRPEGVEETAWSEKVAALIKEKFGLGEGPDVVLEATGAQSCIQTGVHLVKKGGTYVQAGMGKENVVFPITTACIRDLTIRGSIRYSTGCYPVAVDLIASGKIDVRAGGGGL

SEQ ID NO: 19183 - protein, 473 aa, Rhodopseudomonas palustris CGA009
MSETSFDVIIIGSGPGGYVAAIRAAQLGFKTAIVEKSYLGGICLNWGCIPTKALLRSAEIYHYMQHAKDYGLSADNISFDPKAIVQRSRGVSKRLNDGVGFLMKKNKISIIWGQATIDAPGKLTVAASKTDAPKGALPPGSYQAKHIIVATGARPRVLPGLEPDKKLVWTYFEAMVPEVMPKSLLVVGSGAIGIEFASFFHTMGAKVTVVEVLPQILPVEDAEIAALARKRFEKQGIKILTGAKVTKLDKKADSVVATIDPGNGKPETAEFDRVISAVGVVGNVENLGLDKLGVKLDRGTIVTDGLGRTNVPGLYAIGDVAGPPMLAHKAEHEGVICVEAIKGLHPHPLDKSLIPGCTYCQPQVASVGLTEAKAKEQGREIRVGRFPFTANGKAIALGEDQGLVKVIFDKKTGQLLGAHMIGAEVTELIQGYVVAMNLETTEEELMHTVFPHPTLSEMMKEAVLDAYGKVLNA

SEQ ID NO: 19184 - protein, 463 aa, Rhodopseudomonas palustris CGA009
MPINILMPALSPTMEKGNLAKWLKKEGDKVKSGDVIAEIETDKATMEVEAADEGTLAKIIVPEGTQDVPVNDVIAVLAADGEDVKAAGAGWKASAGGAPSPQRGEGAGPSGGKAEANSHIQDKADQRPTPQPPSPLPNGERSLPQAAGEGAPAPANGRVFASPLARRLAKDAGIDIARVTGTGPHGRVIARDVEQAKSGGGLKAPASAPAGPAIAAAMSDQQIRALYPEGSYEVVPHDGMRRTIAQRLTQSTQTIPHFYLTIDCNLDRLLAAREDINAAAPKDKDGKPAYKLSVNDFIIKAMAIALQRIPDANVSWTEGGMLKHKHSDIGVAVAMPGGLITPIIRSAETQSLSSISAQMKDFAARARARKLKPEEYQGGTTAVSNLGMFGIKDFTAVINPPHATILAVGTGEQRAIVKDGKIEVATMMSVTLSCDHRAVDGALGAELIGAFKTLIENPVMMMV

SEQ ID NO: 19185 - protein, 413 aa, Geobacter sulfurreducens PCA
MITGIKGFNDILPGEVERWQHIEATARRVFSLYGFSEIRIPILEKTELFRRSIGDTTDIVEKEMYSFVDKGENAVTMRPEGTASVMRSYIEHKLYAQDPVAKLYYMGPMFRYERPQKGRYRQFHQIGAEVTGVTDPKVDAQVLTMLCHYFAELGLTEPTLQINSLGCPECRPAYRQALIDFLRERLDSLCEDCKRRYQTNPLRALDCKSAHCKEATASAPAMLDSLCAGCDDHFTATRRHLERAGTTYSINNRMVRGLDYYTRTTFELVTGLLGAQSAVAAGGRYDGLISDLGGPAIPGIGFAMGVERIALLLGDQHFVGRPDLFIAALGEEAQDEAFRLMCGLQRNGVAVEMDYEGKSLKSQMRRSDKFNARFTLIIGGDELAIGAAVLKAMDTGVQVEVPLTPEEVAARIT

SEQ ID NO: 19186 - protein, 570 aa, Saccharomyces cerevisiae
MSLLIDSVPTVAYKDQKPGTSGLRKKTKVFMDEPHYTENFIQATMQSIPNGSEGTTLVVGGDGRFYNDVIMNKIAAVGAANGVRKLVIGQGGLLSTPAASHIIRTYEEKCTGGGIILTASHNPGGPENDLGIKYNLPNGGPAPESVTNAIWEASKKLTHYKIIKNFPKLNLNKLGKNQKYGPLLVDIIDPAKAYVQFLKEIFDFDLIKSFLAKQRKDKGWKLLFDSLNGITGPYGKAIFVDEFGLPAEEVLQNWHPLPDFGGLHPDPNLTYARTLVDRVDREKIAFGAASDGDGDRNMIYGYGPAFVSPGDSVAIIAEYAPEIPYFAKQGIYGLARSFPTSSAIDRVAAKKGLRCYEVPTGWKFFCALFDAKKLSICGEESFGTGSNHIREKDGLWAIIAWLNILAIYHRRNPEKEASIKTIQDEFWNEYGRTFFTRYDYEHIECEQAEKVVALLSEFVSRPNVCGSHFPADESLTVIDCGDFSYRDLDGSISENQGLFVKFSNGTKFVLRLSGTGSSGATIRLYVEKYTDKKENYGQTADVFLKPVINSIVKFLRFKEILGTDEPTVRT

SEQ ID NO: 19187 - protein, 171 aa, Spinacia oleracea
MASDSSAQPKSVHEFVVRDARGNDVDLSIYKGKVLLIVNVASQCGLTNSNYTEMTELYEKYRELGLEILAFPCNQFGNQEPGSNEEVLEFACTRFKAEYPIFDKVDVNGSNAAPIYKFLKSSKGGLFGDGLKWNFTKFLVDKDGNVVDRYAPTTSPKSIEKDVKKLLGIQK

SEQ ID NO: 19188 - protein, 545 aa, Candida albicans SC5314
MSSKIERIFSGPALKINAYLDKLPKIYNVFFIASISTIAGMMFGFDISSMSAFIGSGPYMKFFHSPGSDIQGFITASMALGSFFGSIASSFVSEPFGRRLSLLICAFFWMVGAAIQSSSQNRAQLIIGRIISGVGVGFGSAVAPIYGAELAPRKIRGFIGGMFQFFVTLGILIMFYISFGLGHINGVASFRIAWGLQIVPGLCLFLGCFFIPESPRWLAKQGQWEAAEEIVAKVQAHGDRENPDVLIEISEIKDQLLLEQSSKHIGYATLFTKKYIYRTFTAIFAQIWQQLTGMNVMMYYIVYIFQMAGYSGNSNLVASSIQYVINTCVTAPALYFIDKIGRRPLLIGGATMMMAFQFGLAGILGNYSVPWPDSGNDSVNIRIPLDNKSASKGAIACCYLFVASFAFTWGVGIWVYCAEIWGDNRVAQRGNAISTSANWILNFAIAMYTPSGFKNISWKTYIIYGVFCLAMGTHVYFGFPETKGKRLEEIGQMWEENVPAWRSRSWQPTIPIASDAELARKMEVEHQEDKLMNDDSNSESKENQV

SEQ ID NO: 19189 - protein, 334 aa, Staphylococcus aureus subsp. aureus MW2
MIETFKAFVIDKDESGKVTPTFKQLSPTDLPKGDVLIKVHYSGINYKDALATQDHNAVVKSYPMIPGIDLAGTIVESEAPGFEKGEQVIVTSYDLGVSHYGGFSEYARVKSEWIIKLPDTLTLEESMIYGTAGYTAGLAIERLEKVGMNIEDGPVLVRGASGGVGTLAVLMLNELGYKVIASTGKQDVSDQLLELGAKEVIDRLPVEDDHKKPLASSTWQACVDPVGGEGINYVTKRLNHSGSIAVIGMTAGNTYTNSVFPHILRGVNILGIDSVFTAMKLRQRVWRRLAKDLMPENLHEIKQVITFDELPEQLNKVIKHENKGRIVIDFGVDK

SEQ ID NO: 19190 - protein, 120 aa, Triticum aestivum
MEGSSSGKHFILVHGLCHGAWCWYKLVPMLRAAGHRVTALDMAASGAHPARMDEVPSFEDYSRPLLDAVAAAPAGERLVLVGHSLGGLNIALAMERFPRRVAAAVFLAPCMPCVGSHLGV

SEQ ID NO: 19191 - protein, 178 aa, Crocosphaera watsonii WH 8501
MEALTSLGFSSYTQWSIIATVVLLLLTIVGFIFKWGIRFRLVGITSFMVVLTVGLFGLGLGLFERTEIPGAVRFSRVYDNGGNQVIIVVEPSIIETELEATLKQAANDYFSYGRTAGIDNKLTIRARTLVHPETGESLPLYIGQVKRSLSVKNDENMEIDIFQEELKQLSKYQKLAKG

SEQ ID NO: 19192 - protein, 71 aa, Glycine max
  unsure (1)..(71): unsure at all Xaa locations
LCGAAVTTVNRAGACMVSPFTGGKSMAGFPTMNTNTDITFIVSNWGRVAXMQAWPPVGQKMFETLAYLPDL

SEQ ID NO: 19193 - protein, 292 aa, Escherichia coli
MKTRKGIILAGGSGTRLYPVTMAVSKQLLPIYDKPMIYYPLSTLMLAGLRDILIISTPQDTPRFQQLLGDGSQWGLNLQYKVQPSPDGLAQAFIIGEEFIGGDDCALVLGDNIFYGHDLPKLMDVAVNKESGATVFAYHVNDPERYGVVEFDKNGTAISLEEKPLQPKSNYAVTGLYFYDNYVVEMAKNLKPSARGELEITDINRIYMEQGRLSVAMMGRGYAWLDTGTHQSLIEASNFIATIEERQGLKVSCPEEIAYRKGFIDAEQVKVLAEPLKKNAYGQYLLKMIKGY

SEQ ID NO: 19194 - protein, 335 aa, Saccharomyces cerevisiae
MSEPAQKKQKVANNSLEQLKASGTVVVADTGDFGSIAKFQPQDSTTNPSLILAAAKQPTYAKLIDVAVEYGKKHGKTTEEQVENAVDRLLVEFGKEILKIVPGRVSTEVDARLSFDTQATIEKARHIIKLFEQEGVSKERVLIKIASTWEGIQAAKELEEKDGIHCNLTLLFSFVQAVACAEAQVTLISPFVGRILDWYKSSTGKDYKGEADPGVISVKKIYNYYKKYGYKTIVMGASFRSTDEIKNLAGVDYLTISPALLDKLMNSTEPFPRVLDPVSAKKEAGDKISYISDESKFRFDLNEDAMATEKLSEGIRKFSADIVTLFDLIEKKVTA

SEQ ID NO: 19195 - protein, 505 aa, Zea mays
MDGVSAPPPHRRLPDFLQSVNLKYVKLGYHYLITHLLTLTLLPLIAVILLEAGRTDPDDLRQLWLHLQYNLVSVLVLSAVLVFGATVYALTRPRPVYLVDFACYRPPAHLRVRFDQFMRHSRLCGFSDDALEFQRKILERSGLSEETYVPEAMHALPPQPTMANARAEAEAVMFGALDALFRSTGVKPKDVGVLVVNCSLFNPTPSLSAMVVNRYRLRGNVRSFNLGGMGCSAGVIAVDLARDMLQVHRATYAVVVSTENITQNWYFGNRKSMLIPNCLFRVGGAAVLLSNRGADRRRAKYVLRHVVRTHKGADDRAFGCVYQEQDGEGKTGVSLSKDLMAIAGGALKTNITTLGPLVLPVSEQLLFFATLVAKKLLSAKTKPYIPDFKLAFEHFCIHAGGRAVIDELEKNLQLSPAHVEASRMTLHRFGNTSSSSIWYELAYMEAKGRVRRGHRVWQIAFGSGFKCNSAVWHALRNVKPSPDSPWEDCIDRYPVELVDGFPTQQ

SEQ ID NO: 19196 - protein, 214 aa, Paeonia veitchii
IVESVGEGVTDVKPGDHVLPIFTGECKECRHCKLEESNMCDLLRINTDRGVMLNDGKSRFSINGQPIFHFVGTSTFSEYTVLHVGCLAKINPEAPLDKVCVLSCGISTGLGATLNVAKPKKGSTAAIFGLGAVGLAAAEGARMAGASRIIGVDLNPKRFDEARKFGVTEFVNPKDYNKPVQEVIAEMTGGGVDRSVECTGSIMAMMSAFECVHD

SEQ ID NO: 19197 - protein, 855 aa, Sorghum bicolor
MAFSPRSPWSRPKRNDVYSTFVVHGDDDEDDARGSRRGRGPSTRAEEDEEEDPSSLPPLLQRLPKDFGGPSFDEDEDAYSSDPDDASLSATVVFKSGAPASARSPFLDLRRSSPRATDDDPYSTFVVHSTARSGGTSSSPRGSASGTFIRRSGGSSSPHESVSGTFIRRTSTPSSPRDSVSGTFIRRPGSPSSPRGSFSGTFIRHTSGGSSSYESASGGGGGFGSSFWSPAVEQTEELRQPSPLMQQQQQQHSRRKPSVSSAPDSVTREDPSTKYELLHELGKGSYGAVYKARDLRTQELVAVKIISLTEGEEGYEDIRGEIEMLQQCSHPNVVRYFGSYQGEDYLWIVMEYCGGGSVADLIGITEEPLDESQIAYICREALKGLAYLHSIFKVHRDIKGGNILLTEQGEVKLGDFGVAAQLTRTMSKRNTFIGTPHWMAPEVIQESRYDGKVDVWALGVSAIEMAEGMPPRSTVHPMRVIFMISSEPAPMLEDKEKWSLLFHDFIAKCLTKDPRLRPAASEMVKHKFIEKCNSGASKMLAKIKEAKKIRATLAVQNELSDPDNTMQDVPVRINEDYGETVPTNSQQHMNHGTYNDCQAGDFGTMIVHTEDGDEVAESPIFPRTEFIPGLGSINSFTHDPKRAELISSFWAENTGDSDANKDRDLDDRPDIQESKAIPPLTGTVKKHIGAEGTIRRHDNQVNLSPGFANTTKLNSSPSRKAFSVQDKLWSIYAAGNTVPIPFLKAIDISPLALVSENEAGNGLAGSSTNDALEAVRELFSGDGQAKKGRKGQNEVPLPPGVHHRLMTSPTLMNLAQALAYHKTCYEDMPLQDSQATQEQQTIQNLCDTLRTILRL

SEQ ID NO: 19198 - protein, 401 aa, Triticum aestivum
  unsure (1)..(401): unsure at all Xaa locations
MQSAAAIGLLRPCAARPILKSPSPGAVRLPASRAGLRLSAAAPRAGLVAAAGLGRIGLVPASPEQEKRSDCLVAAAAAGKAAAGEEAGEESGAALAKTLQLGVFFGLWYLFNIYFNIYNKQVLKVFPFPINITTVQFAVGTTISLFMWATGILKRPKISGAQLXAILPLAIVHTMGNLFTNMSLGKVAVSFTHTIKAMEPFFSVLLSAMFLGELPTPWVVLSLLPIVGGVALASISEASFNWAGFLSAMASNVTFQSRNVLSKKLMLKKEASLDNINLFSIITVMSFFLLAPVTLLTEGVKVTPTFLQSSGLNLQQVYTRSLIAAFCFHAYQQVSYMILARVSPVTHSVGNCVKRVVVIVTSVLFFKTPVSPINSIGTAIALAGVFLYSQLKRLQPKPKAA

SEQ ID NO: 19199 - protein, 277 aa, Synechococcus sp. PCC 7002
MTVATSQKLPLDWTTIIYFSLIHLVALLAFLPGNFSWQAVGVFLLFHWITGGIGITLGFHRLVSHRSFEVPKWLEYFLIFCGTLACQGGPIDWIGLHRIHHKHSDNTPDPHDSNKGFWWSHIGWMLFEIPARGDIDRYIKDIKDDPFYNFCQKYMVLIQVALGLALYAWGEAWVGNGWSFVIWGVFLRLAVVFHCTWFVNSATHKFGYKSHESNDHSKNCWWVALVTYGEGWHNNHHAYQYSARHGLNWWEIDMTWMTIRFLQALGLAKNIRLAPAK

SEQ ID NO: 19200 - protein, 475 aa, Rickettsia montanensis
MNLLKNITGKNYINGEFIEFGKQISVINPATLKEIATVPNLGLSEINSAINNTVTSFSSWSQSSFEARIAILRRWYNLVIENIEELSHILTLEQGKVLAESKKEILYGVSFIDWYTYAIHNIHSTIKPGNSKAHKIVTQYEPVGPSAAITPWNFPNAMITRKVVPAIAAGCSVILKPSSLTPLSALVLAKFASDAGLPAGVFNVITGSSDIIGKAFCEDFRLRKLSFTGSTNVGKILYQNAANTLKRLSLELGGNAPFIITADNNLEKVVSDLITAKTRNSGQSCISPNRIFIEESIYEKFIEILKAKFTKLKAGDGFDKESDVGPLINSAAIEKIQKLLADAQSKGAKLICGGKAVDNFIEPTIIIDCLDNMDIFRTEIFGPVVACYKFKDLDEVIERANNTEYGLQGYVYSNNISVVQMIASKLDFGMVSINDPLPANAKAPFAGRKASGFGVEGSFEGIFEYLNTKYINLQH

SEQ ID NO: 19201 - protein, 296 aa, Aneurinibacillus thermoaerophilus
MKGIILSGGSGTRLYPLTKVVSKQLLPVYDKPMVYYPLSVLMLAGIKDILIISTPEDTPRFEQLLGGGSELGISLSYAVQSSPDGLAQAFIIGEEFIGDDNVALVLGDNIFYGHGFTELLQRAANRKSGATIFGYNVKDPQRFGVVEFDEKGKVISIEEKPEEPKSSYAVTGLYFYDNRVVDIAKNITPSARGELEITDVNKAYLELGELHVELLGRGFAWLDTGTHESLLQASQFIETIEKRQSLKVACLEEIAYRMGYISREQLIKLAEPLMKNEYGQYLMNLAHRSKDLVTVE

SEQ ID NO: 19202 - protein, 419 aa, Mycobacterium leprae
MPPWQRWAAADRFGAMREVPQVLGIVLAGGEGKRLYPLTADRAKPAVPFGGAYRLVDFVLSNLVNARYLRICVLTQYKSHSLDRHISQNWRLSGLAGEYITPVPAQQRFGPHWYTGSADAIYQSLNLIYDEDPDYLVVFGADHVYRMDPEQMLRFHIGSGAGATVAGIRVPRSDATAFGCIDADDSGRIRRFTEKPLKPPGTPDDPDKTFVSMGNYIFTTKVLVDAIRADADDDHSYHDMGGDILPRLVDGGMAAVYDFSQNEVPGATDWDRAYWRDVGTLDAFYDAHMDLVSLRPVFNLYNKRWPIRGESENLAPAKFVNGGSVQESVVGAGSIISAASVRNSVLSSNVVVDNGAIVEGSVIMPGARVGRGAVIRHAILDKNVVVGPGEMVGVDPERDREHFAISAGGVVVVGKGVWI

SEQ ID NO: 19203 - protein, 511 aa, Cryptococcus neoformans var. neoformans
MFARQPLSQNLLRPLSRPSSSFSRTSTIPKLAFLQSARGFASASEPYDVVIIGGGPGGYVAAIKAAQLGFKTACIEKRGALGGTCLNVGCIPSKAMLNNSHIFHQTQHDLKNRGIDVSGIQLNLPKMLAAKEASVKALTGGIETYLFKKNGIDYIKGEASFETANKLSVKLLEGGETQVEAKNVIIATGSEVTPFPGLEIDEERIVSSTGALELKEVPKKMVVIGGGVIGLELGSVWSRLGAEVTVVEYLGAIGAGMDGEIGKQFQKILTKQGFKFKLNTKVISGHREGDIVKLKVDSAKGGKEETIEADVVLVAIGRRPVTTGLNLEAIGVETDKRGRIIIDDEFNTSAKGVKCIGDVTFGPMLAHKAEEEGIAAVEILKTGHGHVNYDAIPSVVYTHPEVAWVGKNEEELKGAGVQYKIGKFPFAANSRAKTNQDSEGFVKFIVEKETDQVLGCHIIGPAAGELIASAVLAMEYKASAEDIARTCHAHPTLSEAFKEAALSSYDKPINF

SEQ ID NO: 19204 - protein, 230 aa, Arabidopsis thaliana
MSSLHATVSLPLFSNSNHKKLTCAATLSPPPWKQSRRVISVSFFLSRLLLLPNDAMAGGLMDKLDKYVKRKKLDPLEAYVPPVILAQLQIQDLEGFLNVEKPEFEACRRQLRSGPASSLRVNIRAVAQYASDDGFSKTATDDVDRCLRALEELDSLFLRASRKDSNATVVLMKSQLGTALTALDSLLQTVPSQVLDKGKAMVEVYRSASEEDAGSDDLESSEIKQLQSIL

SEQ ID NO: 19205 - protein, 271 aa, Sorghum bicolor
MALAVTPEANLSSGGAAVSLGPLWWASECHGVLYSLAVMLPSLAFVGFLAWQARRSFRRLSYGRSHVVVVAYYALLWAVAVLNLLWCFLQAWQCMPDRAFSWNVLSLFTKSGMLFLEISLIAFLLQGNDARTIYVFGFGVPLFIDVDQGTGGKWGLWILHKLVLTGVYGLIVFMHHSRWRDRLPAKPAYYNYVCAMLLLNGLSLFGCFLIASGAGFGLWLYNLTTVCYHSLYLPLLYVTFLADFFQEEDMLLENVYYSEMKDAGFFDADWD

SEQ ID NO: 19206 - protein, 427 aa, Rhodopseudomonas palustris CGA009
MTAIVDIIGREILDSRGNPTVEVDVVLEDGSVGRAAVPSGASTGAHEAVELRDGDKARYLGKGVQKAVEAVNGELFDALGGMDAEQQVQIDQTMIELDGTPNKGRIGANAILGVSLAAAKAAAASYDMPLYRYVGGTSARTLPVPMMNIVNGGVHADNPIDFQEFMIMPVGAPTFADALRCGSEIFHTLKGELKKAGHNTNVGDEGGFAPNLPSADAALDFVMAAIGKAGYKAGGDVMLALDCAATEFFKDGSYVYGGENKTRSRSEQAKYLADLVARYPIVSIEDGMSEDDMDGWKELTDLIGSKCQLVGDDLFVTNVTRLADGIKNGRANSILIKVNQIGTLTETLAAVEMAHKAGYTAVMSHRSGETEDSTIADLAVATNCGQIKTGSLARADRTAKYNQLLRIEQELGAHAHYAGKAALKALR

SEQ ID NO: 19207 - protein, 211 aa, Lycopersicon esculentum
ILHRVDVGIVIDLEPARTEDPALSIAGAVQSQKLAVRAISHLQSLPGGDIKLLCDTVVESVRELTGYDRVMVYKFHEDEHGEVVAESKRSDLEPYIGLHYPATDIPQASRFLFKQNRVRMVVDCHATPVRVTQDESLMQPLCLVGSTLRAPHGCHAQYMANMGSIASLTLAVIINGNDEEAVGGGRNSMRLWGLVVGHHTSVRSIPFPLRY

SEQ ID NO: 19208 - protein, 338 aa, GIBBERELLA ZEAE PH-1
MAEQMQAWQAAGPGTFESVFKHHPSIPKPTPESLKPGQILVQVSRAALNPADYKVIELGLASRALTSYPKTPGMDLSGRVVAVAADVTDTKAGDYVLARASPLKAFGSLAQFTVCDKEGYSVIPEDMDLDQAAGVGTAGLTAYQSIQPYVKAGDKVFINGGSGGVGLWGIQIAKALGCHVTVSCSTGKAELCKSLGADEIIDYKTSDVMTELRKRGKVFSHCADNVGDSPPNLYGASNDYLLPGSSYVFVGGHVSAKSFISLSAGIVRPAFLGGVKAKFVSYMTVNKTKDLNQLRDWMVEGKVKTVIDSTFGFNEADKAFESLKKGSSGGKIIVRVEE

SEQ ID NO: 19209 - protein, 356 aa, Ralstonia solanacearum
MTKIAVLPGDGIGTEIVAEAVKVLKTLGETFEMETAPVGGAGYEAKGHPLPEDTLKLAKEADAILFGAVGDWKYDTLPRELRPEQAILGLRKHLQLFANFRPAICYPELAGASSMKPEIVAGLDILIVRELTGDIYFGQPRGVRAAPDGLFAGAREGFDTMRYSEPEIRRIAHVAFQAAAKRGKKLCSVDKANVLETFQFWKDIVTDVHKEYPEVELSHMYVDNAAMQLVKAPKNFDVVVTGNMFGDILSDEAAMLTGSIGMLPSASLDANNKGLYEPSHGSAPDIAGKGIANPLATILSAAMMLRYTLGKAEQADRIENAVKKVLAQGYRTGDILTPGCKQVGTVEMGDAVVAAL

SEQ ID NO: 19210 - protein, 509 aa, Streptomyces coelicolor A3(2)
MANSTHTPAERAHRTIHAGGEWLAASSGATREILDPADAVAFAVVAEGDEKDTDLAVAAARRAFDAGDWPHTPVAERAALLRRVAGLLVRDREKLGLLESRDAGKTVEEGRVDIDCVADAFRYFADLVAGEAPGRVVDAGSPEVHSVVVHEPVGVCAMITPWNYPLLQASWKIAPALAAGNTFVIKPSEITPMTTIALIDLLVEAGLPTGVANIVTGPGHTVGARLAEHPDVDLVSFTGGLTSGVKVAQAAAVTVKKVALELGGKNPNVVFADACATEEGFDTAVDQALNAAFMHSGQVCSAGGRLIVEESVRERFVAELARRAERIRLGRGTEEGVECGPLVSAQQRAKTEDYVASALAEGAELRCGGKRPEPSPQRPESGYFYEPTVLDHCHREMRVVREEVFGPVLTVETFRTEDEAVALANDTEYGLAGAVWTADAGRARRVAGRLRHGTVWINDFHPYLPQAEWGGFGKSGVGRELGPAGLAEYRESKHVYQNLAPKPVRWFSG

SEQ ID NO: 19211 - protein, 476 aa, Zea mays
MAQPHLVLPSPRPLLPAAATPSRRAVAVRAALSTASPPAKAAAGAEAVRSIRARQIVDSRGNPTVEVDLVAGDGRLHRSAVPSGASTGIYEALELRDGDKAVYGGKGVLQAVRNINEVIAPKLVGVDVRNQSDVDAIMLDIDGTQNKSKLGANAILGVSLSVCRAGAGAKGVPLYKHIQELAGIKEPVMPVPAFNVINGGSHAGNNLAMQEFMLLPVGAATFAEALRMGSEVYHVLKGIIKAKYGQDACNVGDEGGFAPNVQDNREGLVLLMDAIEKAGYTGMIKIGMDVAASEFLTKDGNYDLNFKNQPNDGVHVLSAQHLGDLYRDFVKDFPIVSIEDPFDQDDWSSWASLQSSVGIQIVGDDLLVTNPKRIADAIDRKACNALLLKVNQIGTVTESIQAALDSKAAGWGVMVSHRSGETEDNFIADLAVGLASGQIKTGAPCRSERLAKYNQLLRIEEGLGNVRYAGEAFRSP

SEQ ID NO: 19212 - protein, 423 aa, Mycobacterium tuberculosis CDC1551
MTEFSSFSAPKGVPDYVPPDSAQFVAVRDGLLAAARQAGYSHIELPIFEDTALFARGVGESTDVVSKEMYTFADRGDRSVTLRPEGTAGVVRAVIEHGLDRGALPVKLCYAGPFFRYERPQAGRYRQLQQVGVEAIGVDDPALDAEVIAIADAGFRSLGLDGFRLEITSLGDESCRPQYRELLQEFLFGLDLDEDTRRRAGINPLRVLDDKRPELRAMTASAPVLLDHLSDVAKQHFDTVLAHLDALGVPYVINPRMVRGLDYYTKTAFEFVHDGLGAQSGIGGGGRYDGLMHQLGGQDLSGIGFGLGVDRTVLALRAEGKTAGDSARCDVFGVPLGEAAKLRLAVLAGRLRAAGVRVDLAYGDRGLKGAMRAAARSGARVALVAGDRDIEAGTVAVKDLTTGEQVSVSMDSVVAEVISRLAG

SEQ ID NO: 19213 - protein, 298 aa, Thermotoga sp. RQ2
MRKAIILAGGAGTRLYPMTLVTSKQLLPVYDKPMIYYPLTTIMLAGIRDILVISTPKDLPKFKDLLGDGSQFGIHLEYAEQPQPKGIAEAFIIGEKFIGDSPCALILGDNIFFGHDLTRILKEAAQNTDRATIFAYYVDDPERFGVVEFDENGRALSIEEKPKNPKSNYAVVGLYFYPSGVSELAKTLKPSARGELEITDLNRIYLEKGLLDVKILGRGFAWFDTGTADALLEAAEFVRIVQKRQNIIIASPEEVAYRNGWITKEDLLEAAKKYRNSVYGEYLRRVAEGKIIYRRENK

SEQ ID NO: 19214 - protein, 197 aa, Triticum aestivum
  unsure (1)..(197): unsure at all Xaa locations
SASRCIKSVTPADGAAGKPCLLISYTSNTFPTDYVPTVFDNXSATNVVVDGSTVNLGLWDTAGQEDYNRLRPLSYRGADVFLLAFSLISKASYENVTKKWIPELRHYAPGVPIILVGTKLDLRDDEQFFVDHPGAVPISTAQGEELKKVIGATAYIECSSKTQQNIKAVFDAAIKVVLQPPKQKRKKRKSQKGCSIL

SEQ ID NO: 19215 - protein, 141 aa, Glycine max
CDQLFLNWLQLVDFRFGKQLSGERTFTICGMADSLAPEIVLGKGHGFPADWWALGVLIYFMLRGEMPFGSWRENELDTVAKIAKRKLHLPETFSPEAVDLISKLLEVEENTRLGSQGPDSVKNHPWFNGVEWEGIRNHTFP

SEQ ID NO: 19216 - protein, 339 aa, Talaromyces emersonii
MFATRQAFNLFQKRAFSASARQSSKVAILGAAGGIGQPLSLLMKLNPRVTELALYDIRGGPGVAADLSHINTNSTVTGYQPTPEGLRDALKGSEIVLIPAGVPRKRGMTRDDLFNTNASIVRDLAKAAADACPNANILVISNPVNSTVPIVAEVFKSKGVYNPKRLFGVTTLDVVRASRFISEVKNTDPANEEVTVVGGHSGVTIVPLISQSNHPDIEGETRDKLVNRIQFGGDEGVKAKDGAGSAALSMAFAGARSPSLCSSGQGVKGVVKPSFVDSPLYKDQGIDFFASRVELGPNGAEKVLPVGKVSPYEEKLLEAAFADLKKNIQKGIDFVKNNP

SEQ ID NO: 19217 - protein, 640 aa, Ustilago maydis 521
MNGYNSGSTLSDAPPGQGQIQQLPGRPMIDLKKKLVVVGDGGCGKTCLLIVYSQNKFPQEYVPTVFENYVPIIQFEGKTIELALWDTAGQEEYDRLRPLSYPESDVILICFAVDFPTSLANVQDKWFPEINHFCEGVPILLVGLKTDLRKDANSLAMLQAQGTKPVTPAQGQHVADEIGAAKYVECSAKTKDGVQNVFDTAIREACRKKGWARRAGVGGAGGAKKNLDPTGLQADAHTGITIVGPAFSHMHPLSGPIVALTRYHYRSLTDTSYDHFRSLVHVLVHVGLPAHTWACSSSSSHPLHQLVFLSTSLSTLSKHVSSLQSLSHMVYFPYASTTQSCHATPRLHAQQRYMSVMSLMDSSIVRHSMQDGMWMFVLMTFENWLDLFIQVVCGSYRLCQIEDRFTRRYRFFVVILDLDIDDMYWSIQLGASAEQVLADGIEAPFFARDDDVGCIFSFLPTLRCAFDVFVSIQHGHKTVGPVQTRIFRIQIRDDVCMLGRLILGPGKRTAEPVPADVTLKPDFASRACAAIDRFWFDAQTTQNKTLLSEDEPATTPLTAAASIVGVGAGIVVEDADADDVGGYGGVVDDDEDICTTKGSAVLEMLAGYEQGRRSAARSISRRNSADYIPRTLVSTSGNEC

SEQ ID NO: 19218 - protein, 486 aa, Vibrio vulnificus YJ016
MEVTAHYIGGKPFVGDTGESFATLNPATGEVLAHIEQADERVLAHAIESAKLGFSVWSSMSAAERSRCLLKAAQLIRDHNDELAELEVRDTGKPIQEASVVDIATGADVIEYFAGLVNGLGGEQQSLGSNQFFYTRREPLGICAGIGAWNYPIQIAMWKAAPALAAGNAMIFKPSEETPLSALKLAELFTQAGVPDGVFNVVQGDYRVGQMLTAHPEIAKVSFTGESGTGKKVMADSAATLKPVTMELGGKSPLIIFDDADLDDAVSAAMVANFYTQGEVCTHGTRVYVQRAMYDAFVEQLKERTEKLIVGDPMNMETQIGSLISKSHLEKVLGAISSAKESGATLLTGGFQVTERGLEKGCFVAPTVFVDCRDEMPHVQNEIFGPVMSVLVFDDEDEVIARANNTQYGLAAGVFTQNLSKAHRVIHQLQAGICWINTWGNSPAEMPVGGYKLSGIGRENGQETLLHYTQTKSVFVELGAFDSPYA

SEQ ID NO: 19219 - protein, 451 aa, Saccharomyces cerevisiae
MLRTRLTNCSLWRPYYTSSLSRVPRAPPDKVLGLSEHFKKVKNVNKIDLTVGIYKDGWGKVTTFPSVAKAQKLIESHLELNKNLSYLPITGSKEFQENVMKFLFKESCPQFGPFYLAHDRISFVQTLSGTGALAVAAKFLALFISRDIWIPDPSWANHKNIFQNNGFENIYRYSYYKDGQIDIDGWIEQLKTFAYNNQQENNKNPPCIILHACCHNPTGLDPTKEQWEKIIDTIYELKMVPIVDMAYQGLESGNLLKDAYLLRLCLNVNKYPNWSNGIFLCQSFAKNMGLYGERVGSLSVITPATANNGKFNPLQQKNSLQQNIDSQLKKIVRGMYSSPPGYGSRVVNVVLSDFKLKQQWFKDVDFMVQRLHHVRQEMFDRLGWPDLVNFAQQHGMFYYTRFSPKQVEILRNNYFVYLTGDGRLSLSGVNDSNVDYLCESLEAVSKMDKLA

SEQ ID NO: 19220 - protein, 363 aa, Yersinia pestis
MTKTYHIAVLPGDGIGPEVMAQASKVLDAVRQRFGLKISTSVYDVGGAAIDRHGSPLPAATVAGCEQADAILFGSVGGPKWEHLPPAEQPERGALLPLRKHFKLFSNLRPARLYQGLEDFCPLRSDIAARGFDILCVRELTGGIYFGQPKGREGQGMHERAFDTEVYHRFEIERIARIAFESARKRRSKVTSIDKANVLQSSILWREVVNGIAADYPDVALSHMYIDNATMQLIKDPSQFDVLLCSNLFGDILSDECAMITGSMGMLPSASLNEQGFGLYEPAGGSAPDIAGKNIANPIAQILSLTLLLRFSLGKDDAADAIERAINQALEQGYRTADLAGDGHAIGTHEMGDIIAKFVVEGV

SEQ ID NO: 19221 - protein, 449 aa, Brassica napus
PPKPQPKPPPKPQPKPPPAPTPSPCPPQPPKPQPKPPPAPTPSPCPPQPPKPQPKPPPAPGPSPKPGPSPSPPKPPPSPAPKPVPPPSPSPKPSPPKPPAPSPKPSPPKPPAPSPPKPQNKTIPAVFFFGDSIFDTGNNNNLDTKLKCNYRPYGMDFPMGVATGRFSNGRVASDYISKYLGVKEIVPAYVDKKLQQNNELQQSDLLTGVSFASGGAGYLPQTSESWKVTTMLDQLTYFQDYKKRMKKLVGKKKTKKIVSKGAAIVVAGSNDLIYTYFGNGAQHLKNDVDSFTTMMADSAASFVLQLYGYGARRIGVIGTPPIGCTPSQRVKKKKICNEDLNYAAQLFNSKLVIILGQLSKTLPNSTIVYGDIYSIFSKMLESPEDYGFEEIKKPCCKIGLTKGGVFCKERTLKNMSNASSYLFWDGLHPSQRAYEISNRKLVKKYIHFI

SEQ ID NO: 19222 - protein, 445 aa, Glycine max
MATIKAVKARQIFDSRGNPTVEVDVILSDGTFHRAAVPSGASTGVYEALELRDGGSDYLGKGVLKAVENVNSIIAPALLGKDPTKQTEIDNFMVQQLDGTVNEWGWCKQKLGANAILAVSLAVCKAGAAVKKIPLYKHIANLAGNKTLVLPVPSFNVINGGSHAGNKLAMQEFMILPVGASSFKEAMKMGVEVYHHLKAVIKKKYGQDATNVGDEGGFAPNIQENKEGLELLKTAIAKAGYTGKVVIGMDVAASEFYDNKDKTYDLNFKEENNDGSQKISGDSLKNVYKSYVTDYPIVSIEDPFDQDDWEHYAKLTAEVGQQVQIVGDDLLVTNPKRVEKAIKEKACNALLLKVNQIGSVTESIEAVRMSKQAGWGVMASHRSGETEDTFIADLSVGLATGQIKTGAPCRSERLAKYNQLLRIEEELGSAAVYAGAKFRAPVEPY

SEQ ID NO: 19223 - protein, 118 aa, Triticum aestivum
  unsure (1)..(118): unsure at all Xaa locations
MGATIQSAKGRQIFDSRGNPTEEVDVCXSNGTFDRGDGSSGASTGVHEALKLRDRGADYLGKGVSNARDNVNLIIEPALIGKDLISYTDLRXFMVHQLDGTINXWGWFKHNSRFNVIL

SEQ ID NO: 19224 - protein, 449 aa, Mycobacterium tuberculosis CDC1551
MASLQQSRRLVTEIPGPASQALTHRRAAAVSSGVGVTLPVFVARAGGGIVEDVDGNRLIDLGSGIAVTTIGNSSPRVVDAVRTQVAEFTHTCFMVTPYEGYVAVAEQLNRITPGSGPKRSVLFNSGAEAVENAVKIARSYTGKPAVVAFDHAYHGRTNLTMALTAKSMPYKSGFGPFAPEIYRAPLSYPYRDGLLDKQLATNGELAAARAIGVIDKQVGANNLAALVIEPIQGEGGFIVPAEGFLPALLDWCRKNHVVFIADEVQTGFARTGAMFACEHEGPDGLEPDLICTAKGIADGLPLSAVTGRAEIMNAPHVGGLGGTFGGNPVACAAALATIATIESDGLIERARQIERLVTDRLTTLQAVDDRIGDVRGRGAMIAVELVKSGTTEPDAGLTERLATAAHAAGVIILTCGMFGNIIRLLPPLTIGDELLSEGLDIVCAILADL

SEQ ID NO: 19225 - protein, 176 aa, Glycine max
  unsure (1)..(176): unsure at all Xaa locations
MASSMISSPAVTTVNRAGAGMVAPFTGLKSMAGFPTRKTNNDITSIASNGGRVQCMQVWPPVGKKKFETLSYLPDLDDAQLAKEVEYLLRKGWIPCLEFELEHGFLYHEHNRSPXYYDGRYWTMWKLPMFGCADASHVLKDLXDAKTGYPDGXVRIMGCDTFGSADRELICYNLPR

SEQ ID NO: 19226 - protein, 519 aa, Staphylococcus aureus subsp. aureus MW2
MKIKAQVAMVLNLDKCIGCHTCSVTCKNTWTNRPGAEYMWFNNVETKPGVGYPKRWEDQEHYKGGWVLNRKGKLELKSGSRISKIALGKIFYNPDMPLIKDYYEPWNYNYEHLTTAKSGKHSPVARAYSEITGDNIEIEWGPNWEDDLAGGHVTGPKDPNIQKIEEDIKFQFDETFMMYLPRLCEHCLNPSCVASCPSGAMYKRDEDGIVLVDQDACRGWRYCMTGCPYKKVYFNWKTNKAEKCTFCFPRIEAGMPTVCSETCTGRMRYLGVLLYDADRVHEAASAVDEKDLYEKQLDIFLNPFDEEVIAQAEKDGIGYDWIEAAQNSPIYKLAIEYKLAFPLHPEFRTMPMVWYCPPLSPIMSYFEGKNTTQNPDAIFPAIEEMRLPIEYLANIFTAGDTEPVKGALQRMAMMRSYMRSQVTQQPFDTSRLERLGITERQTKDMYRLLGLAKYEDRFVIPTSHKETYLDTYHAQGSTGYNYGGEHFGDNCEGCGVAVGSGKTGQEIYNENFYGGIFRD

SEQ ID NO: 19227 - protein, 392 aa, Nitrosomonas europaea ATCC 19718
MSVIKLVDLDLKNKRVFIRADLNVPVKDGKVTSDARITASMATINHCLKQGAKVMVTSHLGRPEEGVWTEENSLQPVADDIARRLGKPVRLIKDWVEGGFEVASGELVVLENCRINKGEKKNLEETAKKYASLCDVFVMDAFGTAHRAEASTHGIAKYAPIACAGILLTEELDALTKALHQPAHPLVAIVGGSKVSTKLTVLESLAEKVDQLVVGGGIANTFLKAAGNNIGKSLCEDELVPVAKSLMDKMNKRNATIPIAVDVVVGKKFAEDEAAVLKAANAVSDDDMIFDIGPESAQELVDIIMKAGTVVWNGPVGVFEFDQFGEGTRAIAKAIAETDAFTLAGGGDTIAAIQKYDIYDKVSYISTAGGAFLEFLEGKKLPAVEILELRAK

SEQ ID NO: 19228 - protein, 355 aa, Ralstonia eutropha JMP134
MESNKQARAEARLNSGLRNYWYPVAASWAVTHAPIGITRLSQNIVLWRDNAGQVHALEDRCPHRGARLSMGWNLGDRVACWYHGVEVGGDGQVKSVPAVDSCPLEGRTCVRSYPVQEQAGAIFLWFGDQAPQEGEGSPDALRLPEELVSEEHSHFLCVAHWDCNYRYAIDNVMDPMHGAYLHAVSHSMACGEKSATMQIRETDHGLIFEKVGQRGVNFDWVEFGETGTLWLRLAIPYRDKVGPGGPFGIVGMATPVDEDHCMVFFWRTRHVQGWQRDAWRFLYRNRLEQLHWDVLEQDRVVLESMAPQARDHEMLYQHDAGITRVRRLLKRRAEQEIADEPVAMLKAAGGVANHA

SEQ ID NO: 19229 - protein, 437 aa, Oryza sativa (japonica cultivar-group)
MPSCRARMHAHQHQHALLAALLACALAASSSTAGAQPAGQQGYAYGDVSGQQVHVSTTMIVLLAAVVGVFLFIAISTIYLRHCTGYDPATEGGGVGGSRSMILPANSFVSRRQRRPRGLDSSVVRMFPTMKYAEAKALRVGKVAGAALECAVCLSEFEDDEMLRFLPKCSHAFHPDCIGQWLASHVTCPVCRRNLDPNKDTTEEVIIPAAAAADPNSTSSEIVVIRQEDGAHPAAVVIDVVTEEDDEERRKEELELQAIGTQLRAMRSRSGLRPKTSAAKLPRSHSTGHSLAVRLDGDLERYTLRLPEHVHREMVAAGEQSVRRGRRLGEGVGMGARCSPRFSRSGRWSSFLSNSLSGKLSFLSPSSRRTPDSTQVEVSSSSSSSVTKVKGKRVAAVDVADDGSAHGTAQYPGCTVASSAAAAAVDVEKAATRQVRT

SEQ ID NO: 19230 - protein, 748 aa, Pseudomonas putida
MTADNSLADAMERCAQEPIQVPGSIQPHGFLLVLDATDLRVLQASENVEHWLGLPARELIGCHFADLVHEGFDLHAHLTRLPEDEVFPFHIGDVRLRQGAPISALLHMLVHCHDQVLIAEFEPPRLPADLVGQGDYYPLVRSFVASLQVASSIEDLLQQTVLQLKRITGFGRVKAYRFDAEGNGQVLAEVVDPGYPSYAGLCFPAADIPRQARELYRVNRIRVIEDANYQPSPLLPATNPRTGKPLDMSFAALRSVSPVHLQYMRNMGTLASMSLSIVVDGQLWGLISCHHQQPRPVDLRTRTACELLASVLSLQIESRESHASTRKLLTLRQHIVRMISSMADHDSVSDGLRDLPEVLLAFADAQGAAVISAERCDLIGQTPPEAQVTALVHWLGQRDEDKVFHSDNLRRDITELPELANHAGGVLAVAISQIHSHYLLWFRPEQIRTVNWAGQPTKQVGPQGNLDPRHSFERWQEEQRGYSQAWDPLVIEGVIELRAAVLGIVLRKAEELAQLAGELRRSNKELEAFSYSVSHDLRAPLRHIAGYTELLGEIEGQGLSERGKRFLQHIGEAAHFAGSLVDNLLNFSQMGRSALRLSDVDLNALVEAIRSELAPDYEGRAIVWDIAPLPKVIGDPAFINMALHNLIANAIKYTRGRTPARIEISAVQHPEETEVCIRDNGVGFDMAYANKLFGVFQRLHRMEDFEGTGIGLASVRRIIERHDGRVWATGQVDQGASFHFTLPRNTAT

SEQ ID NO: 19231 - protein, 175 aa, Triticum aestivum
MAPTVMASSATSVAPFQGLKSTAGLPVSRRSNGASLGSVSNGGRIRCMQVWPIEGIKKFETLSYLPPLSTEALLKQVDYLIRSKWVPCLEFSKVGFIFREHNASPGYYDGRYWTMWKLPMFGCPDATQVINEVEEVKKEYPDAYVRIIGFDNMRQVQWVSFIAFKPPGCEESGKA

SEQ ID NO: 19232 - protein, 450 aa, Ferroplasma acidarmanus
MENDVLLNGVRITTELPGPNAKKIMAEDEKYLATSTKSLPVVAYRGQGCYIEDVDDNVFLDFSSGISTTNIGYGNEYVISKVQEQLHKLWHFAGTDFYYSEQVEAAKALIGVSPGSHDKKVFYANSGAESNEASLKLARSYTKRPQFIGFIGGFHGRTMGALSFTASQPVHHEGFFPEMAGVTHIPFPDPYRNPFNIDGYEEPEDLTNAAIDYLEDYVFGKFLPSNDVAAILVEPIQGEGGYIVPPMDFHKKLMELAHDNEILYIMDEVQTGFGRTGYFFASEYFGVDPDIMSVAKSIASGIPMGASVVKSKYNFEKSGLHSNTFGGNLLASVSSRATIEEIKNKNMVENARKVGDYLNKRLHELQEKYDNIGDVRGLGLMQAIDFVKNRKTKAHFRGLRDKTIENAYKNGLILLGAGESAIRFIPPLIVNEKQIDEAIDILDNSIKKAL

SEQ ID NO: 19233 - protein, 260 aa, Glycine max
MGMGSSACIPQVLCTCADRMYAGILLNTRLACPLSSILSSPFSESAAQFCAASVVIALEDLHKNGVLYRGVSPDVLMLEQTGHIQLVDFRFGKQLSGERTFTICGMADSLAPEIVLGKGHGFPADWWALGVLIYYMLRGEMPFGSWRENELDTVAKIAKRKLHLPETFSPEAVDLISKLLEVEESTRLGSQGPDSVKSHPWFNCIEWEGIRHHTFPVPQEIISRITQYLEVHSEDCSTGYLGSPLQEVKELNVPEWLEDW

SEQ ID NO: 19234 - protein, 454 aa, Populus sieboldii x Populus grandidentata
DLNHRNLTDLAKKFGDILLLRMGQRNLVVVSSPDLAKEVLHTQGVEFGSRTRNVVFDIFTGKGQDMVFTVYGEHWRKMRRIMTVPFFTNKVVQQYRHGWEEEAAQVVEDVKKNPEAATHGIVLRRRLQLMMYNNMYRIMFDRRFESEEDPLFNKLKALNGERSRLAQSFDYNYGDFIPILRPFLRGYLKICKEVKERRLQLFKDYFVEERKKLGSTKSMSNEGLKCAIDHILDAQKKGEINEDNVLYIVENINVAAIETTLWSIEWGIAELVNHPEIQKKLRDELDTVLGPGHQITEPDTYKLPYLNAVIKETLRLRMAIPLLVPHMNLHDAKLGGFDIPAESKILVNAWWLANNPAKWKNPEEFRPERFFEEEAKVEANGNDFRYLPFGVGRRSCPGIILALPILGITLGRLVQNFELLPPPGQSKIDTSEKGGQFSLHILKHSTIVAKPRSF

SEQ ID NO: 19235 - protein, 505 aa, Mycobacterium tuberculosis CDC1551
MLAAGADEVSQAIARLFSDYATHYQSLNAQAAAFHHSFVQTLNAAGGAYSSAEAANASAQALEQNLLAVINAPAQALFGRPLIGNGANGTAASPNGGDGGILYGNGGNGFSQTTAGVAGGAGGSAGLIGNGGNGGAGGAGAAGGAGGAGGWLLGNGGAGGPGGPTDVPAGTGGAGGAGGDAPLIGWGGNGGPGGFAAFGNGGAGGNGGASGSLFGVGGAGGVGGSSEDVGGTGGAGGAGRGLFLGLGGDGGAGGTSNNNGGDGGAGGTAGGRLFSLGGDGGNGGAGTAIGSNAGDGGAGGDSSALIGYAQGGSGGLGGFGESTGGDGGLGGAGAVLIGTGVGGFGGLGGGSNGTGGAGGAGGTGATLIGLGAGGGGGIGGFAVNVGNGVGGLGGQGGQGAALIGLGAGGAGGAGGATVVGLGGNGGDGGDGGGLFSIGVGGDGGNAGNGAMPANGGNGGNAGVIANGSFAPSFVGFGGNGGNGVNGGTGGSGGILFGANGANGPS

SEQ ID NO: 19236 - protein, 566 aa, Citrus x paradisi
MSPSLVANADLSPVTSGTVKGRVASVYSELQTSRIDHALPLPSVLKNPFKIVDGPASSAAGNPDEIAKLFPNLFGQPSALLVPNGADAVRSDEKLKIGVVLSGGQAPGGHNVISGIYDYLQDRAKGSVLYGFRGGPAGIMKCKYVELTSNYIYPYRNQGGFDMICSGRDKIETPEQFKQATETAVKLDLDGLVVIGGDDSNTNACLLAEHFRSKNLKTLVMGCPKTIDGDLKCKEVPASFGFDTACKIYAEMIGNVMIDARSTGKYYHFVRLMGRAASHITLECALQTHPNITIIGEEVAAKKQTLKNVTDYIVDIICKRAELGYNYGVILIPEGLIDFIPEVQQLIAELNEILAHEVVDEGGQWKKKLTKQSLQLFEFLPQAIQEQLMLERDPHGNVQVAKIETEKMLIQMVETELENRKQEGVNKGQFKGQSHFFGYEGRCGLPTNFDATYCYALGYGAGALLHSGKTGLISSVGNLAAPVEEWTVSGTALTALMDVERRHGKFKPVIKKAMVELDGTPFKKFVSMRDEWALNNRYISPGPIQFTGPTSGDVNHTLLLELGAQV

SEQ ID NO: 19237 - protein, 168 aa, Avena sterilis subsp. ludoviciana
VMASSATSVAPFQGLKSTAGLPVSRRSNAGLGSVSNGGRIRCMQVWPIEGIKKFETLSYLPPLTEEALLKQIDFLIRSKWVPCLEFSQGGFIFREHGSTPGYYDGRYWTMWKLPMFGCTDASQVIKEVEEVKKEYPDAYVRIIGFDNIRQVQCVSFIAFKPPGCEESG

SEQ ID NO: 19238 - protein, 337 aa, Thermosynechococcus elongatus BP-1
MKAVAIAEFGEPDVLVLRQVPEPQIEAADEVKIQLRAASVNPIDTKLRQRGTFFPDRRPAILGCDGAGVVVAVGAAVRRFRVGDEVYFCYGGLGDRGGCYAEYAVVPEAAVAHKPKTLSFIQAAALPLAVITAWEALGDRGAVPPLNVLSTAKTVLIHAGAGGVGHLAIQLARRAGAQVATTISSPAKAQFTEALGATLAINYTTTDWVQAVLDWTGGKGVDLALDTVGGATFAETFKAVRPYGTLATLLEPAVDTPWKIARQRNLLIQLTLMLTPQLLGLREALAHQGQILEQVATLVDRGELRVVVDKTFPLGAAADAHRYLSQRLVQGKVVLIP

SEQ ID NO: 19239 - protein, 1016 aa, Rhodobacter sphaeroides
MRLPSLAARPTGPRRTGVPSRLRWTGSVRHIPTRGRMCWPAPPRPSRRSSNGSPLLWQPGGYDRPPPPCRSLPHVCQNFVVRGCLMTISGGTFDPSICEMEPIATPGAIQPHGALMTARADSGRVAHASVNLGEILGLPAASVLGAPIGEVIGRVNEILLREARRSGSETPETIGSFRRSDGQLLHLHAFQSGDYMCLDIEPVRDEDGRLPPGARQSVIETFSSAMTQVELCELAVHGLQLVLGYDRVMAYRFGADGHGEVIAERRRQDLEPYLGLHYPASDIPQIARALYLRQRVGAIADACYRPVPLLGHPELDDGKPLDLTHSSLRSVSPVHLDYMQNMNTAASLTIGLADGDRLWGMLVCHNTTPRIAGPEWRAAAGMIGQVVSLLLSRLGEVENAAETLARQSTLSTLVERLSTGDTLAAAFVAADQLILDLVGASAAVVRLAGQELHFGRTPPVDAMQKVLDSLGRPSPLEVLSLDDVTLRHPELPELLAAGSGILLLPLTSGDGDLIAWFRPEHVQTITWGGNPAEHGTWNPATQRMRPRASFDAWKETVTGRSLPWTSAERNCARELGEAIAAEMAQRTRAELARLRHYDPLTGLANRSYLQERLAQDGQSAAALLFIDLDRFKAVNDSMGHGVGDGLLIEVARSLVATVRPHDLVVRLGGDEFVVLCHRLDAAGIVSLAERLRQVLEQPFEVAGRKCHISASIGIAMADSIGDLDLVRAADIAMYAAKKNGGNRGELFRPSLYEETTQLVELDNDMRGAIESEQFHLVYQPIFALNPETERLVGFEALLRWDHPLHGALQPGIFIPLAERLGHIHAMGNWVLRRAILQLQAFRSAGPELDLKMNVNVSPLQLARPDFLARLADLLAQVPDLPRHALCLEITETSLSDEAVSEALISIRALGVRIAIDDFGTGFSSLACLRRLPVDVAKLDRAFLGGGHTAAQDHRFFAAVTGLVHAADLKVVQEGIETLDQLALVRAAGADFAQGFHLAAPLSIAAALGLIAASRKE

SEQ ID NO: 19240 - protein, 481 aa, Ralstonia metallidurans CH34
MNKLTTAFGAPVVDNQNVQTAGPRGPALLQDVWFLEKLAHFDREVIPERRMHAKGAGAYGTFTVTHDITKYTRANLFSQVGKKTDLFLRFSSVAGERGAADAERDIRGFAIKFYTEEGNWDLVGNNTPVFFLRDPLKFPDLNHAVKRDPRTGMRSAESNWDFWTGLPEALHQVTIVMSDRGIPRTWRHMHGFGSHTYSFINANMERFWVKFHFVTQQGIQNLTDEEAAEITGQDREYHQRDLFESIERGDFPRWKLCVQIMPEAEASKVPYHPFDLTKIWPKKDYPLIEVGVLELNRNPDNFFAEVEQASFAPSTIVPGVGFSPDKMLQGRLFSYGDAARYRVGVNHHQIPVNSPKAAKYVNSYHRDGTMRVDGNRGAAIGYEPNTKGEWAEQPDFREPPLTLEGTADHWNHREDGDYFSQVGALFRLMSPTQQQALFDNTARSIKGVSKHIQQTHIKHCTAADPAYGAGVAAAIEMIEAK

SEQ ID NO: 19241 - protein, 185 aa, Triticum aestivum
MAITLNNGFKMPIIGLGVWRMEDLVSSGLVRSIGISNYDIFLTRDCLAYSKIKPAVNQIETHPYFQRDSLVKFCQKHGICVTAHTPLGGAAANAEWFGTVSCLDDQVLKGLAEKYKKTAAQISLRWGIQRNTVVIPKSSKLERLKENFQVFDFELSKEDMELIGSIDRKYRTNQPAVFWGIDLYA

SEQ ID NO: 19242 - protein, 231 aa, Triticum aestivum
  unsure (1)..(231): unsure at all Xaa locations
MAGGGGGGAEEEELTAQETALYDRQIRVWGVDAQKRLSKAHVLVCGVNGTTIEFCKNIVLAGVGSLSLMDDHIVTEDDLNSNFLIPHDESVYGGKSRAEVCCESLKDFNPMVRVAVAKGDPSLIDGTFIDRFDIIVVSRASLKTKLSINDQTAGRRSKHXAFYSVECKDSCGEIFVDLQNHIYLQKKPGGEPEQQELSYASLQEAISVPWKNLPKKTTKLYYAMRGHDTKT

SEQ ID NO: 19243 - protein, 380 aa, Trifolium repens
MSNTAGQVIKCRAAVAWEAGKPLVIEEVEVAPPQAGEVRLKILFTSLCHTDVYFWEAKGQTPLFPRIFGHEAGGIVESVGEGVTHLKPGDHALPVFTGECGECPHCKSEESNMCNLLRINTDRGVMINDNKSRFSIKGQPVHHFVGTSTFSEYTVVHAGCVAKINPDAPLDKVCILSCGICTGLGATVNVAKPKPGSSVAIFGLGAVGLAAAEGARMSGASRIIGVDLVSSRFELAKKFGVNEFVNPKDHDKPVQQVIAEMTDGGVDRAVECTGSIQAMISAFECVHDGWGVAVLVGVPKKDDAFKTHPMNFLNERTLKGTFYGNYKPRTDLPNVVEQYMKGELELEKFITHSIPFSEINKAFDYMLKGESIRCIIRMEE

SEQ ID NO: 19244 - protein, 251 aa, Shewanella oneidensis MR-1
MSEGESKSTHFGYKTVEADKKADLVAGVFHSVAAKYDIMNDVMSFGIHRFWKRYTIEVSGARPGMKVLDLAGGTGDLTAKFSHLVGDKGEVVLADINDSMLKVGRTKLRDRGIVSNVSYVQANAEALPFPDNHFDIITIAFGLRNVTDKDAALRSMNRVLKPGGKLLVLEFSKPQHEVMRKVYDLYSFKVLPKMGQLITKDADSYEYLAESIRMHPDQDTLKQMMVDAGFEQVDYTNMTDGIVALHRGYKF

SEQ ID NO: 19245 - protein, 136 aa, Arabidopsis thaliana
MASSMLSSATMVASPAQATMVAPFNGLKSSAAFPATRKANNDITSITSNGGRVNCMQVWPPIGKKKFETLSYLPDLTDSELAKEVDYLIRNKWIPCVEFDTDLCTVSTVTHPDTMMDGTGQCGSFPCSVAPTPLKC

SEQ ID NO: 19246 - protein, 229 aa, Zea mays
MCGGAIIFDYIPARRRVSTADFWPGSEADAEDIHASHSSDPQRAPRAKAKPGRRKNQYRGIRQRPWGKWAAEIRDPVKGVRVWLGTYPTAEAAARAYDRAARRIRGAKAKVNFPSDTSSSVTVPTAASRSAAAAAAAQAPAVLPPPKVEAQTQVSDEVKELSEELMAYENYMNFLGIPYMEGGTTAASATTAAASAAAAVAEESQVPAPAGLWSFEDYYYPPSLSLFTE

SEQ ID NO: 19247 - protein, 365 aa, Pseudomonas putida
MPAHSFRIAAIPGDGIGLEVLPEGIRVLEAAALKHGLALEFDTFEWASCDYYLQHGKMMPDDWAEQLKQYDAIYFGAVDWPDKVPDHISLWGSLLKFRREFDQYVNIRPVRLFPGVPCALANRKVGDIDFVVVRENTEGEYSSLGGIMFENTENEIVIQESIFTRRGVDRILKYAFDLAEKRERKHVTSATKSNGMAISMPYWDKRTEAMAAHYPHVSWDKQHIDILCARFVLQPERFDVVVVASNLFGDILSDLGPACAGTIGIAPSANLNPERNFPSLFEPVHGSAPDIFGKNIANPIAMIWSGALMLEFLGQGDERYQRAHDDMLNAIERVIADGSVTPDMGGTLSTQQVGAAISDTLARLD

SEQ ID NO: 19248 - protein, 531 aa, Artificial
  Consensus sequence
  Misc_feature (1)..(1): location 1 can be absent or Met
  Misc_feature (2)..(2): location 2 can be absent or Trp
  Misc_feature (3)..(3): location 3 can be absent or Ser
  Misc_feature (4)..(4): location 4 can be absent or Ala
  Misc_feature (5)..(5): location 5 can be absent or Leu
  Misc_feature (6)..(6): location 6 can be absent or Phe
  Misc_feature (7)..(7): location 7 can be absent or Ser
  Misc_feature (8)..(8): location 8 can be absent or His
  Misc_feature (9)..(9): location 9 can be absent or Leu
  Misc_feature (10)..(10): location 10 can be absent or Arg
  Misc_feature (11)..(11): location 11 can be absent or Glu
  Misc_feature (12)..(12): location 12 can be absent or Val
  Misc_feature (13)..(13): location 13 can be absent or His
  Misc_feature (14)..(14): location 14 can be absent or Lys
  Misc_feature (15)..(15): location 15 can be absent or Arg
  Misc_feature (16)..(16): location 16 can be absent or Ser
  Misc_feature (17)..(17): location 17 can be absent or Gly
  Misc_feature (18)..(18): location 18 can be absent or Val
  Misc_feature (19)..(19): location 19 can be absent or Lys
  Misc_feature (20)..(20): location 20 can be absent or Glu
  Misc_feature (21)..(21): location 21 can be absent or Glu
  Misc_feature (22)..(22): location 22 can be absent or Lys
  Misc_feature (23)..(23): location 23 can be absent or Leu
  Misc_feature (24)..(24): location 24 can be absent or Ile
  Misc_feature (25)..(25): location 25 can be absent or Met
  Misc_feature (26)..(26): location 26 can be absent or Lys
  Misc_feature (27)..(27): location 27 can be absent or Ser
  Misc_feature (28)..(28): location 28 can be absent or Pro
  Misc_feature (29)..(29): location 29 can be absent or Pro or Met
  Misc_feature (30)..(30): location 30 can be absent or Ala
  Misc_feature (31)..(31): location 31 can be absent or Pro or Ala or Met
  Misc_feature (32)..(32): location 32 can be absent or Lys or Glu or Gly
  Misc_feature (33)..(33): location 33 can be absent or Glu or Met or Thr
  Misc_feature (34)..(34): location 34 can be absent or Lys or Glu or Ala or Arg
  Misc_feature (35)..(35): location 35 can be absent or Ala or Pro or Met or Gly
  Misc_feature (36)..(36): location 36 can be absent or Lys or Glu or Met or Ser or Cys
  Misc_feature (37)..(37): location 37 can be absent or Gln or Met or His
  Misc_feature (38)..(38): location 38 can be absent or Lys or Ala or Thr
  Misc_feature (39)..(39): location 39 can be absent or Glu or Ala or Pro or Thr
  Misc_feature (40)..(40): location 40 can be Ile or absent or Gln or His or Gly
  Misc_feature (41)..(41): location 41 can be Asn or absent or Ala or Ser or His
  Misc_feature (42)..(42): location 42 can be absent or Lys or Ala or His or Met or Gly or Thr
  Misc_feature (43)..(43): location 43 can be absent or Lys or Ala or Met or Gly
  Misc_feature (44)..(44): location 44 can be Val or absent or Lys or Met or Gly or Thr
  Misc_feature (45)..(45): location 45 can be Asn or Val or absent or Gln or Ala or Met or Arg or Gly or Thr
  Misc_feature (46)..(46): location 46 can be absent or Lys or Gln or Ala or Arg or His or Thr or Gly
  Misc_feature (47)..(47): location 47 can be Ala or Gln or His or Thr or absent or Trp or Leu or Met
  Misc_feature (48)..(48): location 48 can be Ile or Lys or Ala or Thr or absent or Leu or Ser or Gly
  Misc_feature (49)..(49): location 49 can be Trp or Val or absent or Met or Ser or Gly
  Misc_feature (50)..(50): location 50 can be Asn or Arg or absent or Pro or Leu or Ser or Gly
  Misc_feature (51)..(51): location 51 can be Lys or Gln or Arg or His or Thr or Trp or absent or Ser or Gly
  Misc_feature (52)..(52): location 52 can be Lys or Thr or absent or Glu or Pro or Met or Ser
  Misc_feature (53)..(53): location 53 can be Asn or Lys or Ala or Arg or Val or absent or Pro
  Misc_feature (54)..(54): location 54 can be Ala or Arg or Val or Trp or absent or Pro or Leu or Ser
  Misc_feature (55)..(55): location 55 can be Lys or Trp or absent or Pro or Gly
  Misc_feature (56)..(56): location 56 can be Asn or Ile or Arg or Val or absent or Leu or Phe
  Misc_feature (57)..(57): location 57 can be Arg or absent or Leu or Phe
  Misc_feature (58)..(58): location 58 can be Asn or Ala or Thr or absent or Pro or Ser or Gly
  Misc_feature (59)..(59): location 59 can be Asn or Ile or Gln or Arg or Val or absent or Leu or Ser
  Misc_feature (60)..(60): location 60 can be Gln or Thr or Tyr or Val or absent or Leu or Phe
  Misc_feature (61)..(61): location 61 can be Ala or Gln or His or Thr or Val or absent or Ser
  Misc_feature (62)..(62): location 62 can be Gln or Arg or Thr or absent or Leu or Ser or Gly
  Misc_feature (63)..(63): location 63 can be Ile or Gln or Arg or Thr or absent or Leu or Gly
  Misc_feature (64)..(64): location 64 can be Ala or Cys or Val or absent or Glu or Leu
  Misc_feature (65)..(65): location 65 can be Ala or Arg or absent or Leu or Gly
  Misc_feature (66)..(66): location 66 can be Ile or Val or Trp or absent or Phe or Gly
  Misc_feature (67)..(67): location 67 can be Ile or absent or Pro or Leu or Phe or Ser
  Misc_feature (68)..(68): location 68 can be Ile or Arg or Thr or Val or absent or Leu
  Misc_feature (69)..(69): location 69 can be Ala or Thr or Trp or Val or absent or Glu or Leu or Phe
  Misc_feature (70)..(70): location 70 can be Ile or Ala or Cys or Val or absent or Glu or Phe or Gly
  Misc_feature (71)..(71): location 71 can be Tyr or absent or Leu or Ser
  Misc_feature (72)..(72): location 72 can be Ile or Ala or Arg or Thr or Val or absent or Ser
  Misc_feature (73)..(73): location 73 can be Ile or Trp or Val or absent or Leu or Phe or Ser
  Misc_feature (74)..(74): location 74 can be Ala or Arg or His or Thr or Tyr or Val or absent or Ser
  Misc_feature (75)..(75): location 75 can be Ala or absent or Leu or Phe or Ser
  Misc_feature (76)..(76): location 76 can be Ile or Lys or Ala or Val or absent or Glu or Leu or Ser
  Misc_feature (77)..(77): location 77 can be Asp or His or Arg or Tyr or absent or Leu or Phe or Gly
  Misc_feature (78)..(78): location 78 can be Asp or Arg or Thr or absent or Glu or Leu or Phe
  Misc_feature (79)..(79): location 79 can be Ile or Asp or Ala or Arg or Thr or absent or Ser
  Misc_feature (80)..(80): location 80 can be Ala or Gln or Arg or absent or Ser or Gly
  Misc_feature (81)..(81): location 81 can be Asn or Ala or Gln or Arg or His or Thr or absent or Glu
  Misc_feature (82)..(82): location 82 can be Ile or Asp or Ala or Thr or absent or Glu or Leu or Ser or Gly
  Misc_feature (83)..(83): location 83 can be Lys or Ala or His or Arg or absent or Glu or Leu or Ser or Gly
  Misc_feature (84)..(84): location 84 can be Lys or Gln or absent or Glu or Pro
  Misc_feature (85)..(85): location 85 can be Asn or Ala or Val or absent or Pro
  Misc_feature (86)..(86): location 86 can be Gln or Thr or absent or Pro or Phe
  Misc_feature (87)..(87): location 87 can be Asp or Arg or Val or absent or Leu
  Misc_feature (88)..(88): location 88 can be Ala or His or Thr or absent
  Misc_feature (89)..(89): location 89 can be Arg or Trp or Val or absent
  Misc_feature (90)..(90): location 90 can be Gln or His or absent or Glu or Pro or Gly
  Misc_feature (91)..(91): location 91 can be Asn or Gln or His or Val or absent or Pro
  Misc_feature (92)..(92): location 92 can be His or Arg or absent or Pro or Ser or Gly
  Misc_feature (93)..(93): location 93 can be Gln or Arg or His or Val or absent
  Misc_feature (94)..(94): location 94 can be Gln or Arg or His or absent or Glu or Ser
  Misc_feature (95)..(95): location 95 can be Gln or Arg or Val or absent or Glu or Leu
  Misc_feature (96)..(96): location 96 can be Gln or Arg or Val or absent or Glu or Ser
  Misc_feature (97)..(97): location 97 can be Ile or Lys or Gln or Val or absent or Ser
  Misc_feature (98)..(98): location 98 can be Ala or His or Val or absent or Leu
  Misc_feature (99)..(99): location 99 can be Lys or Ala or Arg or Thr or absent or Leu or Phe
  Misc_feature (100)..(100): location 100 can be Lys or Ala or absent or Pro or Leu or Phe or Ser
  Misc_feature (101)..(101): location 101 can be absent or Gln or Ala or Arg or Val or Ser
  Misc_feature (102)..(102): location 102 can be absent or Lys or Ala or Leu or Gly
  Misc_feature (103)..(103): location 103 can be absent or Arg or Val or Pro
  Misc_feature (104)..(104): location 104 can be absent or Asn or Ala or Arg or Leu
  Misc_feature (105)..(105): location 105 can be absent or Leu or Ser
  Misc_feature (106)..(106): location 106 can be absent or Ala or Leu or Ser
  Misc_feature (107)..(107): location 107 can be absent or Ala or Leu or Gly
  Misc_feature (108)..(108): location 108 can be absent or His or Val or Leu
  Misc_feature (109)..(109): location 109 can be absent or Leu or Gly
  Misc_feature (110)..(110): location 110 can be absent or Lys or Glu or Leu
  Misc_feature (111)..(111): location 111 can be absent or Gln or Val
  Misc_feature (112)..(112): location 112 can be absent or Lys or Ala
  Misc_feature (113)..(113): location 113 can be absent or Leu or Pro or Ser
  Misc_feature (114)..(114): location 114 can be absent or Ala or Val or Glu
  Misc_feature (115)..(115): location 115 can be absent or Val
  Misc_feature (116)..(116): location 116 can be absent or Val or Leu or Ser
  Misc_feature (117)..(117): location 117 can be absent or Asp or Ala
  Misc_feature (118)..(118): location 118 can be absent or Gln or Arg or Thr
  Misc_feature (119)..(119): location 119 can be absent or Thr or Phe or Ser
  Misc_feature (120)..(120): location 120 can be absent or Lys or Ser
  Misc_feature (121)..(121): location 121 can be absent or Asn or Arg or Leu
  Misc_feature (122)..(122): location 122 can be absent or Arg or Cys or Gly
  Misc_feature (123)..(123): location 123 can be absent or Asn or Asp or Ser
  Misc_feature (124)..(124): location 124 can be absent or Gln or Pro or Ser
  Misc_feature (125)..(125): location 125 can be absent or Ala or His or Thr or Glu
  Misc_feature (126)..(126): location 126 can be absent or Ala or His or Val or Glu
  Misc_feature (127)..(127): location 127 can be absent or Gln or His or Thr or Glu
  Misc_feature (128)..(128): location 128 can be absent or Tyr or Val or Pro or Gly
  Misc_feature (129)..(129): location 129 can be absent or Gln or His or Ser or Gly
  Misc_feature (130)..(130): location 130 can be Ala or Trp or absent or Glu or Met or Gly
  Misc_feature (131)..(131): location 131 can be Arg or Thr or absent or Glu or Pro or Leu or Ser
  Misc_feature (132)..(132): location 132 can be Lys or Ala or Arg or absent or Pro or Ser or Gly
  Misc_feature (133)..(133): location 133 can be Ile or Lys or Gln or Arg or Trp or absent or Glu or Leu or Ser
  Misc_feature (134)..(134): location 134 can be Asn or Ala or Gln or absent or Val or Glu or Pro or Leu or Ser or Gly
  Misc_feature (135)..(135): location 135 can be Asn or Gln or Thr or Trp or absent or Glu or Pro or Ser or Gly
  Misc_feature (136)..(136): location 136 can be Asp or absent or Trp or Glu or Leu or Pro or Ser or Gly
  Misc_feature (137)..(137): location 137 can be Asp or Ala or Gln or Arg or Thr or Val or absent or Glu or Ser or Gly
  Misc_feature (138)..(138): location 138 can be Ile or Asn or Asp or Ala or Val or absent or Pro or Ser
  Misc_feature (139)..(139): location 139 can be Ile or Lys or Ala or Arg or His or Thr or Val or absent or Glu or Pro or Ser
  Misc_feature (140)..(140): location 140 can be Ile or Asp or Lys or Ala or Arg or absent or Pro or Leu or Gly
  Misc_feature (141)..(141): location 141 can be Ala or His or Arg or Thr or Val or absent or Pro or Leu or Met or Ser
  Misc_feature (142)..(142): location 142 can be Ala or Thr or absent or Glu or Pro or Leu or Phe or Ser or Gly
  Misc_feature (143)..(143): location 143 can be Asp or Lys or Ala or Gln or Arg or absent or Glu or Pro or Ser or Gly
  Misc_feature (144)..(144): location 144 can be Asn or Ala or His or Arg or Val or absent or Glu or Ser or Gly
  Misc_feature (145)..(145): location 145 can be Ala or Trp or Val or absent or Ser or Gly
  Misc_feature (146)..(146): location 146 can be Asp or Ala or Arg or absent or Val or Leu or Phe or Ser or Gly
  Misc_feature (147)..(147): location 147 can be Asp or Ala or His or absent or Ser or Gly
  Misc_feature (148)..(148): location 148 can be Ala or Arg or Cys or absent or Val or Ser or Gly
  Misc_feature (149)..(149): location 149 can be Asn or Asp or Ala or Glu or Pro or Leu or Gly
  Misc_feature (150)..(150): location 150 can be Ala or Gln or Arg or Glu or Ser or Gly
  Misc_feature (151)..(151): location 151 can be Asp or Lys or Thr or Glu or Ser or Gly
  Misc_feature (153)..(153): location 153 can be Asn or Asp or Arg or Ser
  Misc_feature (154)..(154): location 154 can be Val or Trp or Leu
  Misc_feature (155)..(155): location 155 can be Tyr or Phe or Ser or Gly
  Misc_feature (156)..(156): location 156 can be Xaa or Arg or Val or Glu or Leu or Ser
  Misc_feature (158)..(158): location 158 can be Lys or Arg or Glu or Pro or Ser
  Misc_feature (159)..(159): location 159 can be Arg or Trp
  Misc_feature (161)..(161): location 161 can be Arg or Tyr or Phe
  Misc_feature (163)..(163): location 163 can be Asn or Glu
  Misc_feature (164)..(164): location 164 can be Ala or Val or Glu
  Misc_feature (165)..(165): location 165 can be Ala or Ser
  Misc_feature (166)..(166): location 166 can be Ala or Gln or His or Arg or Tyr
  Misc_feature (168)..(168): location 168 can be Trp or Val or Leu
  Misc_feature (170)..(170): location 170 can be Asn or Lys or Asp or Arg or Glu or Ser
  Misc_feature (171)..(171): location 171 can be Glu or Gly
  Misc_feature (172)..(172): location 172 can be His or Glu or Leu or Ser or Gly
  Misc_feature (173)..(173): location 173 can be Asn or Asp or Lys or Ala or Gln or Glu
  Misc_feature (175)..(175): location 175 can be Lys or Ala or Arg or Thr or Glu or Pro or Ser
  Misc_feature (176)..(176): location 176 can be Tyr or Val or Phe
  Misc_feature (177)..(177): location 177 can be Ile or Leu or Ser or Met
  Misc_feature (178)..(178): location 178 can be Gln or Thr or Phe or Ser
  Misc_feature (179)..(179): location 179 can be Asp or Glu or Pro
  Misc_feature (180)..(180): location 180 can be Gln or Glu
  Misc_feature (181)..(181): location 181 can be Val or Leu or Ser
  Misc_feature (182)..(182): location 182 can be Ala or Thr
  Misc_feature (183)..(183): location 183 can be Xaa or Cys
  Misc_feature (184)..(184): location 184 can be Asp or Gln or His or Glu or Met
  Misc_feature (185)..(185): location 185 can be Lys or Ala or Arg
  Misc_feature (186)..(186): location 186 can be Asn or His or Tyr or Phe
  Misc_feature (189)..(189): location 189 can be Asn or Lys or Arg or Thr or Pro or Ser
  Misc_feature (191)..(191): location 191 can be Asp or Ala or Thr or Val or Leu
  Misc_feature (192)..(192): location 192 can be Lys or Ala or Arg or Ser or Met or Gly
  Misc_feature (194)..(194): location 194 can be Lys or Xaa or Gln
  Misc_feature (195)..(195): location 195 can be Asn or Lys or His or Tyr or Phe
  Misc_feature (199)..(199): location 199 can be Lys or Gln
  Misc_feature (201)..(201): location 201 can be Asp or Ala or Arg or His
  Misc_feature (202)..(202): location 202 can be Asn or Gln or Thr or Gly
  Misc_feature (203)..(203): location 203 can be His or absent
  Misc_feature (204)..(204): location 204 can be absent or Gly
  Misc_feature (206)..(206): location 206 can be Asn or Asp or Ser
  Misc_feature (207)..(207): location 207 can be Ile or Leu
  Misc_feature (208)..(208): location 208 can be Lys or Pro or Ser
  Misc_feature (209)..(209): location 209 can be Arg or Ser
  Misc_feature (210)..(210): location 210 can be Trp or Phe
  Misc_feature (211)..(211): location 211 can be Asn or Asp
  Misc_feature (212)..(212): location 212 can be Ala or Val or Gly
  Misc_feature (213)..(213): location 213 can be Ile or Lys or Arg or Thr or Glu or Met
  Misc_feature (214)..(214): location 214 can be Lys or Ala or Glu or Leu
  Misc_feature (215)..(215): location 215 can be Leu or Phe or Met
  Misc_feature (216)..(216): location 216 can be Trp or Leu
  Misc_feature (217)..(217): location 217 can be Glu or Gly
  Misc_feature (218)..(218): location 218 can be Asn or Lys or Arg or Glu or Met
  Misc_feature (221)..(221): location 221 can be Asn or Gly
  Misc_feature (224)..(224): location 224 can be Leu or Met
  Misc_feature (225)..(225): location 225 can be Val or Met
  Misc_feature (226)..(226): location 226 can be Tyr or Phe
  Misc_feature (231)..(231): location 231 can be Ile or Val or Leu
  Misc_feature (234)..(234): location 234 can be Asn or Gly
  Misc_feature (236)..(236): location 236 can be Tyr or Trp
  Misc_feature (237)..(237): location 237 can be Ile or Ala or Val or Glu
  Misc_feature (239)..(239): location 239 can be Leu or Met
  Misc_feature (240)..(240): location 240 can be Val or Leu
  Misc_feature (242)..(242): location 242 can be Leu or Met
  Misc_feature (243)..(243): location 243 can be Ile or Val or Leu
  Misc_feature (244)..(244): location 244 can be Asp or Gln or His or Glu or Ser
  Misc_feature (245)..(245): location 245 can be Ala or Arg or His or Thr or Ser
  Misc_feature (246)..(246): location 246 can be Val or Phe or Ser or Gly
  Misc_feature (247)..(247): location 247 can be Ile or Ala or Val
  Misc_feature (248)..(248): location 248 can be Thr or Pro
  Misc_feature (249)..(249): location 249 can be Asn or Asp or Ala or Glu or Pro
  Misc_feature (250)..(250): location 250 can be absent or Arg
  Misc_feature (251)..(251): location 251 can be absent or Gly
  Misc_feature (252)..(252): location 252 can be absent or Gln or Thr or Pro
  Misc_feature (253)..(253): location 253 can be Lys or Asp or absent or Leu
  Misc_feature (254)..(254): location 254 can be Asp or Lys or Ala or Arg or Thr or Leu or Ser or Gly
  Misc_feature (255)..(255): location 255 can be Lys or Gln or His or Arg or Leu or Met or Ser
  Misc_feature (256)..(256): location 256 can be Lys or Arg or Thr or Tyr or Met
  Misc_feature (257)..(257): location 257 can be Ile or Lys or Arg or Ser or Met
  Misc_feature (258)..(258): location 258 can be Ile or His or Arg or Thr or Phe or Met
  Misc_feature (259)..(259): location 259 can be Asn or Ile or Thr or Val or Glu or Ser
  Misc_feature (260)..(260): location 260 can be Asn or Ala or Thr or Tyr or Pro or Phe or Ser
  Misc_feature (261)..(261): location 261 can be Asn or Phe or Ser or Gly
  Misc_feature (262)..(262): location 262 can be Asp or Ala or Arg or Ser or Gly
  Misc_feature (263)..(263): location 263 can be Asn or His or Ser
  Misc_feature (264)..(264): location 264 can be Leu or Ser
  Misc_feature (265)..(265): location 265 can be Asn or Ile or Thr
  Misc_feature (266)..(266): location 266 can be Ile or Thr or Val or Ser
  Misc_feature (268)..(268): location 268 can be Lys or Arg or Thr or Tyr
  Misc_feature (269)..(269): location 269 can be Ile or Ala
  Misc_feature (270)..(270): location 270 can be Lys or His or Glu or Leu or Phe
  Misc_feature (271)..(271): location 271 can be Asn or Glu
  Misc_feature (275)..(275): location 275 can be Thr or Ser
  Misc_feature (276)..(276): location 276 can be Ile or Val
  Misc_feature (277)..(277): location 277 can be Asp or Glu
  Misc_feature (278)..(278): location 278 can be Tyr or Phe
  Misc_feature (279)..(279): location 279 can be Tyr or Leu
  Misc_feature (280)..(280): location 280 can be Trp or Gly
  Misc_feature (281)..(281): location 281 can be Ala or Pro or Ser
  Misc_feature (283)..(283): location 283 can be Leu or Phe
  Misc_feature (284)..(284): location 284 can be Ile or Leu
  Misc_feature (285)..(285): location 285 can be Ala or Val or Leu
  Misc_feature (291)..(291): location 291 can be Asn or Asp or His
  Misc_feature (292)..(292): location 292 can be Ala or Pro
  Misc_feature (293)..(293): location 293 can be Ile or Thr or Val or Leu
  Misc_feature (294)..(294): location 294 can be Asn or Ile or Xaa or Arg or Val
  Misc_feature (297)..(297): location 297 can be Ile or Val or Leu or Phe
  Misc_feature (298)..(298): location 298 can be Asp or Ala or Glu or Pro
  Misc_feature (299)..(299): location 299 can be Asp or Tyr or Glu
  Misc_feature (301)..(301): location 301 can be Ile or Thr
  Misc_feature (302)..(302): location 302 can be Ile or Val
  Misc_feature (304)..(304): location 304 can be Ile or Ala or Val or Pro or Gly
  Misc_feature (305)..(305): location 305 can be Asp or Ala or Gln or Thr or Glu
  Misc_feature (306)..(306): location 306 can be Lys or Ala or Arg or Thr or Ser
  Misc_feature (307)..(307): location 307 can be Ile or Val or Leu
  Misc_feature (308)..(308): location 308 can be Asn or Glu or Leu
  Misc_feature (309)..(309): location 309 can be Lys or Arg
  Misc_feature (312)..(312): location 312 can be Asn or Ala or Arg or Ser
  Misc_feature (313)..(313): location 313 can be Ala or His or Tyr or Val or Leu or Phe
  Misc_feature (315)..(315): location 315 can be Lys or Arg or Thr or Glu or Gly
  Misc_feature (316)..(316): location 316 can be Asn or Asp or Gly
  Misc_feature (317)..(317): location 317 can be Ala or Ser
  Misc_feature (319)..(319): location 319 can be Ile or Val or Phe
  Misc_feature (320)..(320): location 320 can be Ile or Leu
  Misc_feature (324)..(324): location 324 can be Thr or Ser
  Misc_feature (325)..(325): location 325 can be Tyr or Phe
  Misc_feature (329)..(329): location 329 can be Gln or Arg or Met
  Misc_feature (330)..(330): location 330 can be Ile or Lys or Gln or Arg or Thr or absent or Met
  Misc_feature (331)..(331): location 331 can be absent or Gly
  Misc_feature (332)..(332): location 332 can be absent or Gln or Pro
  Misc_feature (333)..(333): location 333 can be absent or Lys or Val
  Misc_feature (334)..(334): location 334 can be absent or Lys or Met
  Misc_feature (335)..(335): location 335 can be Lys or Gln or Arg or absent or Leu or Pro
  Misc_feature (336)..(336): location 336 can be Ile or Lys or Ala or Arg or absent or Leu or Pro
  Misc_feature (337)..(337): location 337 can be Asp or Trp or absent or Leu or Pro or Met
  Misc_feature (338)..(338): location 338 can be Ile or Lys or Asp or Gln or Thr or absent or Gly
  Misc_feature (339)..(339): location 339 can be Ile or Val or absent or Met or Gly
  Misc_feature (340)..(340): location 340 can be Lys or Ala or His or Arg or absent or Leu or Met
  Misc_feature (341)..(341): location 341 can be Ile or Xaa or Gln or Cys or Trp or absent or Met
  Misc_feature (342)..(342): location 342 can be Asn or Lys or Ala or absent or Gly
  Misc_feature (343)..(343): location 343 can be Arg or Cys or absent or Val or Ser
  Misc_feature (344)..(344): location 344 can be Arg or absent or Leu or Phe or Met
  Misc_feature (345)..(345): location 345 can be Asp or absent or Trp or Tyr
  Misc_feature (346)..(346): location 346 can be Asn or absent or Gly
  Misc_feature (347)..(347): location 347 can be absent or Pro
  Misc_feature (348)..(348): location 348 can be absent or Ala
  Misc_feature (349)..(349): location 349 can be absent or Ala
  Misc_feature (350)..(350): location 350 can be absent or Val
  Misc_feature (351)..(351): location 351 can be absent or Val
  Misc_feature (352)..(352): location 352 can be absent or Ala
  Misc_feature (353)..(353): location 353 can be absent or Ala
  Misc_feature (354)..(354): location 354 can be absent or Ala
  Misc_feature (355)..(355): location 355 can be absent or Ala
  Misc_feature (356)..(356): location 356 can be absent or Glu or Ser
  Misc_feature (357)..(357): location 357 can be absent or Glu or Phe
  Misc_feature (358)..(358): location 358 can be His or Glu or Gly
  Misc_feature (359)..(359): location 359 can be Asn or Lys or Asp or Glu
  Misc_feature (360)..(360): location 360 can be Lys or Glu or Leu or Pro or Gly
  Misc_feature (361)..(361): location 361 can be Asn or Asp or Tyr or Ser
  Misc_feature (362)..(362): location 362 can be Lys or Ala or Gly
  Misc_feature (363)..(363): location 363 can be Ile or Asp or Lys or Ala or Val
  Misc_feature (364)..(364): location 364 can be Ile or Cys or Tyr or Leu or Ser
  Misc_feature (365)..(365): location 365 can be Lys or Asp or Val or Glu
  Misc_feature (366)..(366): location 366 can be Arg or Val or Glu
  Misc_feature (367)..(367): location 367 can be Ile or Val or Leu or Met
  Misc_feature (368)..(368): location 368 can be Asp or Gln or Glu or Gly
  Misc_feature (369)..(369): location 369 can be Thr or Ser or Met or Gly
  Misc_feature (370)..(370): location 370 can be Ala or His or Val or Glu or Leu
  Misc_feature (371)..(371): location 371 can be Asp or Arg or Glu or Gly
  Misc_feature (372)..(372): location 372 can be Ala or Val or Gly
  Misc_feature (373)..(373): location 373 can be Tyr or Phe or Met
  Misc_feature (374)..(374): location 374 can be Glu or Gly
  Misc_feature (375)..(375): location 375 can be Ile or Leu or Met
  Misc_feature (376)..(376): location 376 can be Ala or Val
  Misc_feature (377)..(377): location 377 can be Ile or Val or Leu or Met
  Misc_feature (378)..(378): location 378 can be Asn or Lys or Gln or Arg or Gly
  Misc_feature (379)..(379): location 379 can be Lys or Ala or Thr
  Misc_feature (380)..(380): location 380 can be Val or Trp or Leu
  Misc_feature (381)..(381): location 381 can be Ala or Thr or Val or Ser
  Misc_feature (382)..(382): location 382 can be Asp or Gln or Arg or Glu
  Misc_feature (383)..(383): location 383 can be Tyr or Trp
  Misc_feature (384)..(384): location 384 can be Val or Leu or Met
  Misc_feature (385)..(385): location 385 can be Ala or Glu or Ser or Gly
  Misc_feature (386)..(386): location 386 can be Asn or Lys or Ala or Val or Glu or Phe or Ser
  Misc_feature (387)..(387): location 387 can be Asn or Lys or His
  Misc_feature (388)..(388): location 388 can be Ile or Val or Met
  Misc_feature (389)..(389): location 389 can be Asn or Lys or Asp
  Misc_feature (390)..(390): location 390 can be Lys or Arg or absent or Pro
  Misc_feature (391)..(391): location 391 can be Asn or Ala or Arg or Leu
  Misc_feature (392)..(392): location 392 can be Asn or Ile or Lys or Arg
  Misc_feature (393)..(393): location 393 can be Lys or Thr or Ser
  Misc_feature (394)..(394): location 394 can be Lys or Gln or Arg
  Misc_feature (395)..(395): location 395 can be Ile or Val or Leu
  Misc_feature (396)..(396): location 396 can be Tyr or Phe
  Misc_feature (398)..(398): location 398 can be Ala or Val or Met
  Misc_feature (399)..(399): location 399 can be Thr or Ser or Gly
  Misc_feature (400)..(400): location 400 can be Met or Ser
  Misc_feature (403)..(403): location 403 can be Ala or Thr
  Misc_feature (405)..(405): location 405 can be Gln or Thr or Glu or Leu or Ser
  Misc_feature (406)..(406): location 406 can be Lys or Arg or Trp
  Misc_feature (407)..(407): location 407 can be Ala or Ser
  Misc_feature (408)..(408): location 408 can be Lys or Asp or Arg or absent or Glu or Ser
  Misc_feature (409)..(409): location 409 can be Asn or Asp or absent or Glu
  Misc_feature (410)..(410): location 410 can be absent or Trp
  Misc_feature (411)..(411): location 411 can be Lys or absent or Glu or Gly
  Misc_feature (412)..(412): location 412 can be Asp or absent or Pro or Gly
  Misc_feature (413)..(413): location 413 can be Ile or Asp or Ala or Gln or absent or Glu or Gly
  Misc_feature (414)..(414): location 414 can be Asp or Ala or absent or Leu or Ser
  Misc_feature (415)..(415): location 415 can be Asn or Asp or Lys or Ala or absent or Glu or Ser
  Misc_feature (416)..(416): location 416 can be Asn or Gln or Ala or absent or Gly
  Misc_feature (417)..(417): location 417 can be Asn or Lys or Ala or absent
  Misc_feature (418)..(418): location 418 can be Ala or Cys or absent
  Misc_feature (419)..(419): location 419 can be Tyr or absent or Leu or Gly
  Misc_feature (420)..(420): location 420 can be Asn or absent or Gly
  Misc_feature (421)..(421): location 421 can be Asn or Gln or absent or Glu
  Misc_feature (422)..(422): location 422 can be Lys or Ala or His or Thr or absent or Ser
  Misc_feature (423)..(423): location 423 can be absent or Gly
  Misc_feature (424)..(424): location 424 can be absent or Cys
  Misc_feature (425)..(425): location 425 can be absent or Tyr
  Misc_feature (426)..(426): location 426 can be absent or Glu or Ser or Gly
  Misc_feature (427)..(427): location 427 can be absent or Glu or Leu or Pro
  Misc_feature (428)..(428): location 428 can be Ile or Thr or absent
  Misc_feature (429)..(429): location 429 can be Asp or Gln or absent or Tyr or Glu or Ser
  Misc_feature (430)..(430): location 430 can be Ile or Lys or Arg or Tyr or absent or Pro
  Misc_feature (431)..(431): location 431 can be Ile or Arg or Thr or Val or absent or Glu or Pro
  Misc_feature (432)..(432): location 432 can be Asp or Ala or absent or Pro or Gly
  Misc_feature (433)..(433): location 433 can be Asp or Ala or Thr or Tyr or absent or Gly
  Misc_feature (434)..(434): location 434 can be absent or Glu or Pro or Gly
  Misc_feature (435)..(435): location 435 can be Ile or absent or Tyr or Glu or Gly
  Misc_feature (436)..(436): location 436 can be Asp or Arg or absent or Tyr
  Misc_feature (437)..(437): location 437 can be Asn or Asp or Lys or Arg or absent
  Misc_feature (438)..(438): location 438 can be Ala or Thr or absent or Glu or Leu or Ser or Gly
  Misc_feature (439)..(439): location 439 can be Ala or Thr or absent or Ser or Gly
  Misc_feature (440)..(440): location 440 can be Arg or Thr or Tyr or absent or Ser
  Misc_feature (441)..(441): location 441 can be Thr or Trp or absent or Gly
  Misc_feature (442)..(442): location 442 can be Asp or Thr or absent or Ser or Gly
  Misc_feature (443)..(443): location 443 can be Asp or absent or Tyr or Pro or Ser
  Misc_feature (444)..(444): location 444 can be absent or Pro or Met or Ser or Gly
  Misc_feature (445)..(445): location 445 can be Lys or Ala or Thr or absent or Leu or Ser or Met
  Misc_feature (446)..(446): location 446 can be Asp or absent or Phe or Ser or Met
  Misc_feature (447)..(447): location 447 can be Lys or Asp or Ala or absent or Leu or Met
  Misc_feature (448)..(448): location 448 can be Lys or Arg or absent or Pro or Met or Gly
  Misc_feature (449)..(449): location 449 can be Ala or Thr or Val or absent or Leu
  Misc_feature (450)..(450): location 450 can be Lys or Arg or Val or absent or Leu or Met
  Misc_feature (451)..(451): location 451 can be Gln or His or Arg or absent or Glu or Ser
  Misc_feature (452)..(452): location 452 can be Asn or Ile or Ala or Thr or Val or absent or Tyr
  Misc_feature (453)..(453): location 453 can be Ile or Val or absent or Glu or Phe
  Misc_feature (454)..(454): location 454 can be Ala or Gln or Arg or absent or Glu or Leu or Gly
  Misc_feature (455)..(455): location 455 can be Lys or Asp or Arg or absent or Glu
  Misc_feature (456)..(456): location 456 can be Ile or Arg or Thr or Val or absent or Pro or Gly
  Misc_feature (457)..(457): location 457 can be absent or Leu or Phe
  Misc_feature (458)..(458): location 458 can be Lys or absent or Glu or Ser or Gly
  Misc_feature (459)..(459): location 459 can be Asn or Gln or Thr or absent or Glu or Pro
  Misc_feature (460)..(460): location 460 can be Lys or Arg or absent or Leu or Ser
  Misc_feature (461)..(461): location 461 can be Lys or absent or Ser or Gly
  Misc_feature (462)..(462): location 462 can be Ile or Val or absent or Leu or Ser
  Misc_feature (463)..(463): location 463 can be Asn or Lys or Ala or His or Arg or absent or Pro
  Misc_feature (464)..(464): location 464 can be absent or Val or Met
  Misc_feature (465)..(465): location 465 can be Gln or Arg or absent or Ser or Gly
  Misc_feature (466)..(466): location 466 can be Ile or Val or absent or Leu or Met
  Misc_feature (467)..(467): location 467 can be Ile or Val or absent or Leu
  Misc_feature (468)..(468): location 468 can be Asn or absent
  Misc_feature (469)..(469): location 469 can be Ile or Val or absent or Phe
  Misc_feature (470)..(470): location 470 can be Thr or absent
  Misc_feature (471)..(471): location 471 can be Gln or Arg or absent or Glu
  Misc_feature (472)..(472): location 472 can be absent or Leu
  Misc_feature (473)..(473): location 473 can be Thr or absent or Phe or Ser
  Misc_feature (474)..(474): location 474 can be Asp or absent or Glu
  Misc_feature (475)..(475): location 475 can be Arg or absent or Tyr
  Misc_feature (476)..(476): location 476 can be Arg or absent
  Misc_feature (477)..(477): location 477 can be Ile or Lys or absent
  Misc_feature (478)..(478): location 478 can be Asp or absent or Glu
  Misc_feature (479)..(479): location 479 can be Ala or absent or Gly
  Misc_feature (480)..(480): location 480 can be His or absent
  Misc_feature (481)..(481): location 481 can be Thr or absent or Pro
  Misc_feature (482)..(482): location 482 can be Gln or Thr or absent or Ser
  Misc_feature (483)..(483): location 483 can be Ile or absent or Val
  Misc_feature (484)..(484): location 484 can be His or Tyr or absent or Phe
  Misc_feature (485)..(485): location 485 can be Lys or Arg or absent
  Misc_feature (486)..(486): location 486 can be Lys or Arg or absent
  Misc_feature (487)..(487): location 487 can be Gln or Tyr or absent or Phe
  Misc_feature (488)..(488): location 488 can be Trp or Tyr or absent or Phe
  Misc_feature (489)..(489): location 489 can be Asn or Asp or Ala or Thr or absent or Val or Glu or Gly
  Misc_feature (490)..(490): location 490 can be Thr or absent or Pro
  Misc_feature (491)..(491): location 491 can be Val or absent or Leu
  Misc_feature (492)..(492): location 492 can be Lys or Arg or Thr or absent
  Misc_feature (493)..(493): location 493 can be Asp or Lys or absent or Glu or Pro
  Misc_feature (494)..(494): location 494 can be Asn or absent or Glu
  Misc_feature (495)..(495): location 495 can be Gln or absent or Glu
  Misc_feature (496)..(496): location 496 can be Ile or Arg or absent or Leu
  Misc_feature (497)..(497): location 497 can be Ala or Arg or absent or Ser
  Misc_feature (498)..(498): location 498 can be Asn or Asp or absent
  Misc_feature (499)..(499): location 499 can be absent or Pro
  Misc_feature (500)..(500): location 500 can be Lys or Ala or absent or Pro or Ser
  Misc_feature (501)..(501): location 501 can be Ile or absent or Ser
  Misc_feature (502)..(502): location 502 can be Asn or absent or Tyr
  Misc_feature (503)..(503): location 503 can be Ala or absent or Ser
  Misc_feature (504)..(504): location 504 can be Asp or absent
  Misc_feature (505)..(505): location 505 can be Cys or absent
  Misc_feature (506)..(506): location 506 can be Ile or Thr or absent
  Misc_feature (507)..(507): location 507 can be His or absent
  Misc_feature (508)..(508): location 508 can be absent or Trp
  Misc_feature (509)..(509): location 509 can be Cys or absent
  Misc_feature (510)..(510): location 510 can be absent or Leu
  Misc_feature (511)..(511): location 511 can be absent or Pro
  Misc_feature (512)..(512): location 512 can be absent or Gly
  Misc_feature (513)..(513): location 513 can be absent or Val or Leu
  Misc_feature (514)..(514): location 514 can be Gln or absent or Pro
  Misc_feature (515)..(515): location 515 can be Asp or absent
  Misc_feature (516)..(516): location 516 can be Thr or absent or Val
  Misc_feature (517)..(517): location 517 can be absent or Trp
  Misc_feature (518)..(518): location 518 can be Asn or absent
  Misc_feature (519)..(519): location 519 can be Gln or His or absent or Glu
  Misc_feature (520)..(520): location 520 can be absent or Leu or Phe
  Misc_feature (521)..(521): location 521 can be absent or Leu
  Misc_feature (522)..(522): location 522 can be absent or Tyr or Phe
  Misc_feature (523)..(523): location 523 can be Ala or His or absent or Ser or Gly
  Misc_feature (524)..(524): location 524 can be Lys or His or absent or Tyr or Phe
  Misc_feature (525)..(525): location 525 can be Ile or absent or Leu
  Misc_feature (526)..(526): location 526 can be Thr or absent or Val or Leu or Phe or Met
  Misc_feature (527)..(527): location 527 can be Asp or Gln or His or absent or Phe or Ser
  Misc_feature (528)..(528): location 528 can be Lys or Gln or His or absent or Val or Pro
  Misc_feature (529)..(529): location 529 can be Arg or His or absent or Ser
  Misc_feature (530)..(530): location 530 can be Lys or absent or Ser
  Misc_feature (531)..(531): location 531 can be absent or Ser
XXXXXXXXXXXXXXXXXXXXXXXXXXXXXXXXXXXXXXXXXXXXXXXXXXXXXXXXXXXXXXXXXXXXXXXXXXXXXXXXXXXXXXXXXXXXXXXXXXXXXXXXXXXXXXXXXXXXXXXXXXXXXXXXXXXXXXXXXXXXXXXXXXXXXXXCXXXXGXWVYDNXSXPLYXXXXCXFXXXXXACXKYGRXDXXYQHWRWQPHGXXCDLPRFXXXKXLEXLRNKRXVFVGDSXNRNQWVSXVCXVXXXIPXXXXXXXXXXXXNGSLXXFKAXEYNATIDFYWSPLLVESNSDXPXXHRVXXRIIRAXXIEKHAXXWXXADXIVFNSYLWWRXXXXXXXXXXXXXXXXGXXXXXXXXXSFEDXDAXXXEXXMXXXXEXAXXXLXEWLXXNXXXNKTRXFFXXXSPTHXWAXXWGGXXXXXCXNEXXXXXXIXXXXXXXYXXXXXXXXXMXXAXXXXXXXLXXXGXXVQIXNITXLSXYRKDXHPXXXRRQXXPLTXEQIAXPXSYADCTHWCLPGVPDVWNEXLYXYXXXXXXX

SEQ ID NO: 19249 - DNA, 10289 bp, Artificial
  pMON82060
cgcgccttaattaagcggccgcatcgatcgtgaagtttctcatctaagcccccatttggacgtgaatgtagacacgtcgaaataaagatttccgaattagaataatttgtttattgctttcgcctataaatacgacggatcgtaatttgtcgttttatcaaaatgtactttcattttataataacgctgcggacatctacatttttgaattgaaaaaaaattggtaattactctttctttttctccatattgaccatcatactcattgctgatccatgtagatttcccggacatgaagccatttacaattgaatatatcctgccgccgctgccgctttgcacccggtggagcttgcatgttggtttctacgcagaactgagccggttaggcagataatttccattgagaactgagccatgtgcaccttccccccaacacggtgagcgacggggcaacggagtgatccacatgggacttttcctagcttggctgccatttttggggtgaggccgttcgcggccgaggggcgcagcccctggggggatgggaggcccgcgttagcgggccgggagggttcgagaagggggggcaccccccttcggcgtgcgcggtcacgcgcacagggcgcagccctggttaaaaacaaggtttataaatattggtttaaaagcaggttaaaagacaggttagcggtggccgaaaaacgggcggaaacccttgcaaatgctggattttctgcctgtggacagcccctcaaatgtcaataggtgcgcccctcatctgtcagcactctgcccctcaagtgtcaaggatcgcgcccctcatctgtcagtagtcgcgcccctcaagtgtcaataccgcagggcacttatccccaggcttgtccacatcatctgtgggaaactcgcgtaaaatcaggcgttttcgccgatttgcgaggctggccagctccacgtcgccggccgaaatcgagcctgcccctcatctgtcaacgccgcgccgggtgagtcggcccctcaagtgtcaacgtccgcccctcatctgtcagtgagggccaagttttccgcgaggtatccacaacgccggcggccggccgcggtgtctcgcacacggcttcgacggcgtttctggcgcgtttgcagggccatagacggccgccagcccagcggcgagggcaaccagcccggtgagcgtcggaaagggtcgatcgaccgatgcccttgagagccttcaacccagtcagctccttccggtgggcgcggggcatgactatcgtcgccgcacttatgactgtcttctttatcatgcaactcgtaggacaggtgccggcagcgctctgggtcattttcggcgaggaccgctttcgctggagcgcgacgatgatcggcctgtcgcttgcggtattcggaatcttgcacgccctcgctcaagccttcgtcactggtcccgccaccaaacgtttcggcgagaagcaggccattatcgccggcatggcggccgacgcgctgggctacgtcttgctggcgttcgcgacgcgaggctggatggccttccccattatgattcttctcgcttccggcggcatcgggatgcccgcgttgcaggccatgctgtccaggcaggtagatgacgaccatcagggacagcttcaaggatcgctcgcggctcttaccagcctaacttcgatcattggaccgctgatcgtcacggcgatttatgccgcctcggcgagcacatggaacgggttggcatggattgtaggcgccgccctataccttgtctgcctccccgcgttgcgtcgcggtgcatggagccgggccacctcgacctgaatggaagccggcggcacctcgctaacggattcaccactccaagaattggagccaatcaattcttgcggagaactgtgaatgcgcaaaccaacccttggcagaacatatccatcgcgtccgccatctccagcagccgcacgcggcgcatctcgggcagcgttgggtcctggccacgggtgcgcatgatcgtgctcctgtcgttgaggacccggctaggctggcggggttgccttactggttagcagaatgaatcaccgatacgcgagcgaacgtgaagcgactgctgctgcaaaacgtctgcgacctgagcaacaacatgaatggtcttcggtttccgtgtttcgtaaagtctggaaacgcggaagtcagcgccctgcaccattatgttccggatctgcatcgcaggatgctgctggctaccctgtggaacacctacatctgtattaacgaagcgctggcattgaccctgagtgatttttctctggtcccgccgcatccataccgccagttgtttaccctcacaacgttccagtaaccgggcatgttcatcatcagtaacccgtatcgtgagcatcctctctcgtttcatcggtatcattacccccatgaacagaaatcccccttacacggaggcatcagtgaccaaacaggaaaaaaccgcccttaacatggcccgctttatcagaagccagacattaacgcttctggagaaactcaacgagctggacgcggatgaacaggcagacatctgtgaatcgcttcacgaccacgctgatgagctttaccgcagctgcctcgcgcgtttcggtgatgacggtgaaaacctctgacacatgcagctcccggagacggtcacagcttgtctgtaagcggatgccgggagcagacaagcccgtcagggcgcgtcagcgggtgttggcgggtgtcggggcgcagccatgacccagtcacgtagcgatagcggagtgtatactggcttaactatgcggcatcagagcagattgtactgagagtgcaccatatgcggtgtgaaataccgcacagatgcgtaaggagaaaataccgcatcaggcgctcttccgcttcctcgctcactgactcgctgcgctcggtcgttcggctgcggcgagcggtatcagctcactcaaaggcggtaatacggttatccacagaatcaggggataacgcaggaaagaacatgtgagcaaaaggccagcaaaaggccaggaaccgtaaaaaggccgcgttgctggcgtttttccataggctccgcccccctgacgagcatcacaaaaatcgacgctcaagtcagaggtggcgaaacccgacaggactataaagataccaggcgtttccccctggaagctccctcgtgcgctctcctgttccgaccctgccgcttaccggatacctgtccgcctttctcccttcgggaagcgtggcgctttctcatagctcacgctgtaggtatctcagttcggtgtaggtcgttcgctccaagctgggctgtgtgcacgaaccccccgttcagcccgaccgctgcgccttatccggtaactatcgtcttgagtccaacccggtaagacacgacttatcgccactggcagcagccactggtaacaggattagcagagcgaggtatgtaggcggtgctacagagttcttgaagtggtggcctaactacggctacactagaaggacagtatttggtatctgcgctctgctgaagccagttaccttcggaaaaagagttggtagctcttgatccggcaaacaaaccaccgctggtagcggtggtttttttgtttgcaagcagcagattacgcgcagaaaaaaaggatctcaagaagatcctttgatcttttctacggggtctgacgctcagtggaacgaaaactcacgttaagggattttggtcatgagattatcaaaaaggatcttcacctagatccttttaaattaaaaatgaagttttaaatcaatctaaagtatatatgagtaaacttggtctgacagttaccaatgcttaatcagtgaggcacctatctcagcgatctgtctatttcgttcatccatagttgcctgactccccgtcgtgtagataactacgatacgggagggcttaccatctggccccagtgctgcaatgataccgcgagacccacgctcaccggctccagatttatcagcaataaaccagccagccggaagggccgagcgcagaagtggtcctgcaactttatccgcctccatccagtctattaattgttgccgggaagctagagtaagtagttcgccagttaatagtttgcgcaacgttgttgccattgctgcaggtcgggagcacaggatgacgcctaacaattcattcaagccgacaccgcttcgcggcgcggcttaattcaggagttaaacatcatgagggaagcggtgatcgccgaagtatcgactcaactatcagaggtagttggcgtcatcgagcgccatctcgaaccgacgttgctggccgtacatttgtacggctccgcagtggatggcggcctgaagccacacagtgatattgatttgctggttacggtgaccgtaaggcttgatgaaacaacgcggcgagctttgatcaacgaccttttggaaacttcggcttcccctggagagagcgagattctccgcgctgtagaagtcaccattgttgtgcacgacgacatcattccgtggcgttatccagctaagcgcgaactgcaatttggagaatggcagcgcaatgacattcttgcaggtatcttcgagccagccacgatcgacattgatctggctatcttgctgacaaaagcaagagaacatagcgttgccttggtaggtccagcggcggaggaactctttgatccggttcctgaacaggatctatttgaggcgctaaatgaaaccttaacgctatggaactcgccgcccgactgggctggcgatgagcgaaatgtagtgcttacgttgtcccgcatttggtacagcgcagtaaccggcaaaatcgcgccgaaggatgtcgctgccgactgggcaatggagcgcctgccggcccagtatcagcccgtcatacttgaagctaggcaggcttatcttggacaagaagatcgcttggcctcgcgcgcagatcagttggaagaatttgttcactacgtgaaaggcgagatcaccaaggtagtcggcaaataatgtctaacaattcgttcaagccgacgccgcttcgcggcgcggcttaactcaagcgttagatgctgcaggcatcgtggtgtcacgctcgtcgtttggtatggcttcattcagctccggttcccaacgatcaaggcgagttacatgatcccccatgttgtgcaaaaaagcggttagctccttcggtcctccgatcgaggatttttcggcgctgcgctacgtccgcgaccgcgttgagggatcaagccacagcagcccactcgaccttctagccgacccagacgagccaagggatctttttggaatgctgctccgtcgtcaggctttccgacgtttgggtggttgaacagaagtcattatcgcacggaatgccaagcactcccgaggggaaccctgtggttggcatgcacatacaaatggacgaacggataaaccttttcacgcccttttaaatatccgattattctaataaacgctcttttctcttaggtttacccgccaatatatcctgtcaaacactgatagtttaaactgaaggcgggaaacgacaatctggcgcgcctgcggccgcctcgaggtcattcatatgcttgagaagagagtcgggatagtccaaaataaaacaaaggtaagattacctggtcaaaagtgaaaacatcagttaaaaggtggtataaagtaaaatatcggtaataaaaggtggcccaaagtgaaatttactcttttctactattataaaaattgaggatgtttttgtcggtactttgatacgtcatttttgtatgaattggtttttaagtttattcgcttttggaaatgcatatctgtatttgagtcgggttttaagttcgtttgcttttgtaaatacagagggatttgtataagaaatatctttaaaaaaacccatatgctaatttgacataatttttgagaaaaatatatattcaggcgaattctcacaatgaacaataataagattaaaatagctttcccccgttgcagcgcatgggtattttttctagtaaaaataaaagataaacttagactcaaaacatttacaaaaacaacccctaaagttcctaaagcccaaagtgctatccacgatccatagcaagcccagcccaacccaacccaacccaacccaccccagtccagccaactggacaatagtctccacacccccccactatcaccgtgagttgtccgcacgcaccgcacgtctcgcagccaaaaaaaaaaaaagaaagaaaaaaaagaaaaagaaaaaacagcaggtgggtccgggtcgtgggggccggaaacgcgaggaggatcgcgagccagcgacgaggccggccctccctccgcttccaaagaaacgccccccatcgccactatatacatacccccccctctcctcccatccccccaaccctaccaccaccaccaccaccacctccacctcctcccccctcgctgccggacgacgagctcctcccccctccccctccgccgccgccgcgccggtaaccaccccgcccctctcctctttctttctccgttttttttttccgtctcggtctcgatctttggccttggtagtttgggtgggcgagaggcggcttcgtgcgcgcccagatcggtgcgcgggaggggcgggatctcgcggctggggctctcgccggcgtggatccggcccggatctcgcggggaatggggctctcggatgtagatctgcgatccgccgttgttgggggagatgatggggggtttaaaatttccgccatgctaaacaagatcaggaagaggggaaaagggcactatggtttatatttttatatatttctgctgcttcgtcaggcttagatgtgctagatctttctttcttctttttgtgggtagaatttgaatccctcagcattgttcatcggtagtttttcttttcatgatttgtgacaaatgcagcctcgtgcggagcttttttgtaggtagaccgcggaccggtcgcgcctcagcagtcgctgtcgttaacccagcggtactcgctgaggcgatcgcgggcccggtaccctgcaatgtgaccctagacttgtccatcttctggattggccaacttaattaatgtatgaaataaaaggatgcacacatagtgacatgctaatcactataatgtgggcatcaaagttgtgtgttatgtgtaattactaattatctgaataagagaaagagatcatccatatttcttatcctaaatgaatgtcacgtgtctttataattctttgatgaaccagatgcattttattaaccaattccatatacatataaatattaatcatatataattaatatcaattgggttagcaaaacaaatctagtctaggtgtgttttgctaattattgggggatagtgcaaaaagaaatctacgttctcaataattcagatagaaaacttaataaagtgagataatttacatagattgcttttatcctttgatatatgtgaaaccatgcatgatataaggaaaatagatagagaaataattttttacatcgttgaatatgtaaacaatttaattcaagaagctaggaatataaatattgaggagtttatgattattattattattttgatgttcaatgaagttttttttaatttcatatgaagtatacaaaaattcttcatagatttttgtttctatgccgtagttatctttaatatatttgtggttgaagaaatttattgctagaaacgaatggattgtcaatttttttttaaagcaaatatatatgaaattatactgtatattattttagtcatgattaaaatgtggccttaattgaatcatctttctcattcattttttcaaaagcatatcaggatgattgatatttatctattttaaaaattaatttaagggttcaaattaaatttaacttaaaagtgtcctaaccgtagttaaaggtttactttaaaaaaatactatgaaaaatctaatcttctatgaatcgacctgcaggatttaaatccatcgttctggggcctaacgggccaagctttccgatcctacctgtcacttcatcaaaaggacagtagaaaaggaaggtggcacctacaaatgccatcattgcgataaaggaaaggctatcattcaagatgcctctgccgacagtggtcccaaagatggacccccacccacgaggagcatcgtggaaaaagaagacgttccaaccacgtcttcaaagcaagtggattgatgtgatacttccactgacgtaagggatgacgcacaatcccactatccttcgcaagacccttcctctatataaggaagttcatttcatttggagaggacacgctgaaatcaccagtctctctctacaagatcggggatctctagctagacgatcgtttcgcatgattgaacaagatggattgcacgcaggttctccggccgcttgggtggagaggctattcggctatgactgggcacaacagacaatcggctgctctgatgccgccgtgttccggctgtcagcgcaggggcgcccggttctttttgtcaagaccgacctgtccggtgccctgaatgaactgcaggacgaggcagcgcggctatcgtggctggccacgacgggcgttccttgcgcagctgtgctcgacgttgtcactgaagcgggaagggactggctgctattgggcgaagtgccggggcaggatctcctgtcatctcaccttgctcctgccgagaaagtatccatcatggctgatgcaatgcggcggctgcatacgcttgatccggctacctgcccattcgaccaccaagcgaaacatcgcatcgagcgagcacgtactcggatggaagccggtcttgtcgatcaggatgatctggacgaagagcatcaggggctcgcgccagccgaactgttcgccaggctcaaggcgcgcatgcccgacggcgaggatctcgtcgtgacccatggcgatgcctgcttgccgaatatcatggtggaaaatggccgcttttctggattcatcgactgtggccggctgggtgtggcggaccgctatcaggacatagcgttggctacccgtgatattgctgaagagcttggcggcgaatgggctgaccgcttcctcgtgctttacggtatcgccgctcccgattcgcagcgcatcgccttctatcgccttcttgacgagttcttctgagcgggactctggggttcgaagaattcccgatcgttcaaacatttggcaataaagtttcttaagattgaatcctgttgccggtcttgcgatgattatcatataatttctgttgaattacgttaagcatgtaataattaacatgtaatgcatgacgttatttatgagatgggtttttatgattagagtcccgcaattatacatttaatacgcgatagaaaacaaaatatagcgcgcaaactaggataaattatcgcgcgcggtgtcatctatgttactagatcggggatatcgcgtgtctttataattctttgatgaaccagatgcattttattaaccaattccatatacatataaatattaatcatatataattaatatcaattgggttagcaaaacaaatctagtctaggtgtgttttgctaattattgggggatagtgcaaaaagaaatctacgttctcaataattcagatagaaaacttaataaagtgagataatttacatagattgcttttatcctttgatatatgtgaaaccatgcatgatataaggaaaatagatagagaaataattttttacatcgttgaatatgtaaacaatttaattcaagaagctaggaatataaatattgaggagtttatgattattattattattttgatgttcaatgaagttttttttaatttcatatgaagtatacaaaaattcttcatagatttttgtttctatgccgtagttatctttaatatatttgtggttgaagaaatttattgctagaaacgaatggattgtcaatttttttttaaagcaaatatatatgaaattatactgtatattattttagtcatgattaaaatgtggccttaattgaatcatctttctcattcattttttcaaaagcatatcaggatgattgatatttatctattttaaaaattaatttaagggttcaaattaaatttaacttaaaagtgtcctaaccgtagttaaaggtttactttaaaaaaatactatgaaaaatctaatcttctatgaatcgaccgctgatcgatcgcggccgctgg

SEQ ID NO: 19250 - DNA, 9769 bp, Artificial
  pMON82053
ggtccgatgtgagacttttcaacaaagggtaatatccggaaacctcctcggattccattgcccagctatctgtcactttattgtgaagatagtggaaaaggaaggtggctcctacaaatgccatcattgcgataaaggaaaggccatcgttgaagatgcctctgccgacagtggtcccaaagatggacccccacccacgaggagcatcgtggaaaaagaagacgttccaaccacgtcttcaaagcaagtggattgatgtgatggtccgattgagacttttcaacaaagggtaatatccggaaacctcctcggattccattgcccagctatctgtcactttattgtgaagatagtggaaaaggaaggtggctcctacaaatgccatcattgcgataaaggaaaggccatcgttgaagatgcctctgccgacagtggtcccaaagatggacccccacccacgaggagcatcgtggaaaaagaagacgttccaaccacgtcttcaaagcaagtggattgatgtgatatctccactgacgtaagggatgacgcacaatcccactatccttcgcaagacccttcctctatataaggaagttcatttcatttggagaggaccaggtggtaccggcgcgcctcagcagtcgctgtcgttaacccagcggtactcgctgaggcgatcgcgggccctgatcacctgtcgtacagtatttctacatttgatgtgtgatttgtgaagaacatcaaacaaaacaagcactggctttaatatgatgataagtattatggtaattaattaattggcaaaaacaacaatgaagctaaaattttatttattgagccttgcggttaatttcttgtgatgatctttttttttattttctaattatatatagtttcctttgctttgaaatgctaaaggtttgagagagttatgctctttttttcttcctctttcttttttaactttatcatacaaattttgaataaaaatgtgagtacattgagctcatttaaataagcttgatggggatcagattgtcgtttcccgccttcagtttaaactatcagtgtttgacaggatatattggcgggtaaacctaagagaaaagagcgtttattagaataatcggatatttaaaagggcgtgaaaaggtttatccgttcgtccatttgtatgtgcatgccaaccacagggttcccctcgggagtgcttggcattccgtgcgataatgacttctgttcaaccacccaaacgtcggaaagcctgacgacggagcagcattccaaaaagatcccttggctcgtctgggtcggctagaaggtcgagtgggctgctgtggcttgatccctcaacgcggtcgcggacgtagcgcagcgccgaaaaatcctcgatcggaggaccgaaggagctaaccgcttttttgcacaacatgggggatcatgtaactcgccttgatcgttgggaaccggagctgaatgaagccataccaaacgacgagcgtgacaccacgatgcctgcagcatctaacgcttgagttaagccgcgccgcgaagcggcgtcggcttgaacgaattgttagacattatttgccgactaccttggtgatctcgcctttcacgtagtgaacaaattcttccaactgatctgcgcgcgaggccaagcgatcttcttgtccaagataagcctgcctagcttcaagtatgacgggctgatactgggccggcaggcgctccattgcccagtcggcagcgacatccttcggcgcgattttgccggttactgcgctgtaccaaatgcgggacaacgtaagcactacatttcgctcatcgccagcccagtcgggcggcgagttccatagcgttaaggtttcatttagcgcctcaaatagatcctgttcaggaaccggatcaaagagttcctccgccgctggacctaccaaggcaacgctatgttctcttgcttttgtcagcaagatagccagatcaatgtcgatcgtggctggctcgaagatacctgcaagaatgtcattgcgctgccattctccaaattgcagttcgcgcttagctggataacgccacggaatgatgtcgtcgtgcacaacaatggtgacttctacagcgcggagaatctcgctctctccaggggaagccgaagtttccaaaaggtcgttgatcaaagctcgccgcgttgtttcatcaagccttacggtcaccgtaaccagcaaatcaatatcactgtgtggcttcaggccgccatccactgcggagccgtacaaatgtacggccagcaacgtcggttcgagatggcgctcgatgacgccaactacctctgatagttgagtcgatacttcggcgatcaccgcttccctcatgatgtttaactcctgaattaagccgcgccgcgaagcggtgtcggcttgaatgaattgttaggcgtcatcctgtgctcccgacctgcagcaatggcaacaacgttgcgcaaactattaactggcgaactacttactctagcttcccggcaacaattaatagactggatggaggcggataaagttgcaggaccacttctgcgctcggcccttccggctggctggtttattgctgataaatctggagccggtgagcgtgggtctcgcggtatcattgcagcactggggccagatggtaagccctcccgtatcgtagttatctacacgacggggagtcaggcaactatggatgaacgaaatagacagatcgctgagataggtgcctcactgattaagcattggtaactgtcagaccaagtttactcatatatactttagattgatttaaaacttcatttttaatttaaaaggatctaggtgaagatcctttttgataatctcatgaccaaaatcccttaacgtgagttttcgttccactgagcgtcagaccccgtagaaaagatcaaaggatcttcttgagatcctttttttctgcgcgtaatctgctgcttgcaaacaaaaaaaccaccgctaccagcggtggtttgtttgccggatcaagagctaccaactctttttccgaaggtaactggcttcagcagagcgcagataccaaatactgtccttctagtgtagccgtagttaggccaccacttcaagaactctgtagcaccgcctacatacctcgctctgctaatcctgttaccagtggctgctgccagtggcgataagtcgtgtcttaccgggttggactcaagacgatagttaccggataaggcgcagcggtcgggctgaacggggggttcgtgcacacagcccagcttggagcgaacgacctacaccgaactgagatacctacagcgtgagctatgagaaagcgccacgcttcccgaagggagaaaggcggacaggtatccggtaagcggcagggtcggaacaggagagcgcacgagggagcttccagggggaaacgcctggtatctttatagtcctgtcgggtttcgccacctctgacttgagcgtcgatttttgtgatgctcgtcaggggggcggagcctatggaaaaacgccagcaacgcggcctttttacggttcctggccttttgctggccttttgctcacatgttctttcctgcgttatcccctgattctgtggataaccgtattaccgcctttgagtgagctgataccgctcgccgcagccgaacgaccgagcgcagcgagtcagtgagcgaggaagcggaagagcgcctgatgcggtattttctccttacgcatctgtgcggtatttcacaccgcatatggtgcactctcagtacaatctgctctgatgccgcatagttaagccagtatacactccgctatcgctacgtgactgggtcatggctgcgccccgacacccgccaacacccgctgacgcgccctgacgggcttgtctgctcccggcatccgcttacagacaagctgtgaccgtctccgggagctgcatgtgtcagaggttttcaccgtcatcaccgaaacgcgcgaggcagctgcggtaaagctcatcagcgtggtcgtgaagcgattcacagatgtctgcctgttcatccgcgtccagctcgttgagtttctccagaagcgttaatgtctggcttctgataaagcgggccatgttaagggcggttttttcctgtttggtcactgatgcctccgtgtaagggggatttctgttcatgggggtaatgataccgatgaaacgagagaggatgctcacgatacgggttactgatgatgaacatgcccggttactggaacgttgtgagggtaaacaactggcggtatggatgcggcgggaccagagaaaaatcactcagggtcaatgccagcgcttcgttaatacagatgtaggtgttccacagggtagccagcagcatcctgcgatgcagatccggaacataatggtgcagggcgctgacttccgcgtttccagactttacgaaacacggaaaccgaagaccattcatgttgttgctcaggtcgcagacgttttgcagcagcagtcgcttcacgttcgctcgcgtatcggtgattcattctgctaaccagtaaggcaaccccgccagcctagccgggtcctcaacgacaggagcacgatcatgcgcacccgtggccaggacccaacgctgcccgagatgcgccgcgtgcggctgctggagatggcggacgcgatggatatgttctgccaagggttggtttgcgcattcacagttctccgcaagaattgattggctccaattcttggagtggtgaatccgttagcgaggtgccgccggcttccattcaggtcgaggtggcccggctccatgcaccgcgacgcaacgcggggaggcagacaaggtatagggcggcgcctacaatccatgccaacccgttccatgtgctcgccgaggcggcataaatcgccgtgacgatcagcggtccaatgatcgaagttaggctggtaagagccgcgagcgatccttgaagctgtccctgatggtcgtcatctacctgcctggacagcatggcctgcaacgcgggcatcccgatgccgccggaagcgagaagaatcataatggggaaggccatccagcctcgcgtcgcgaacgccagcaagacgtagcccagcgcgtcggccgccatgccggcgataatggcctgcttctcgccgaaacgtttggtggcgggaccagtgacgaaggcttgagcgagggcgtgcaagattccgaataccgcaagcgacaggccgatcatcgtcgcgctccagcgaaagcggtcctcgccgaaaatgacccagagcgctgccggcacctgtcctacgagttgcatgataaagaagacagtcataagtgcggcgacgatagtcatgccccgcgcccaccggaaggagctgactgggttgaaggctctcaagggcatcggtcgatcgaccctttccgacgctcaccgggctggttgccctcgccgctgggctggcggccgtctatggccctgcaaacgcgccagaaacgccgtcgaagccgtgtgcgagacaccgcggccggccgccggcgttgtggatacctcgcggaaaacttggccctcactgacagatgaggggcggacgttgacacttgaggggccgactcacccggcgcggcgttgacagatgaggggcaggctcgatttcggccggcgacgtggagctggccagcctcgcaaatcggcgaaaacgcctgattttacgcgagtttcccacagatgatgtggacaagcctggggataagtgccctgcggtattgacacttgaggggcgcgactactgacagatgaggggcgcgatccttgacacttgaggggcagagtgctgacagatgaggggcgcacctattgacatttgaggggctgtccacaggcagaaaatccagcatttgcaagggtttccgcccgtttttcggccaccgctaacctgtcttttaacctgcttttaaaccaatatttataaaccttgtttttaaccagggctgcgccctgtgcgcgtgaccgcgcacgccgaaggggggtgcccccccttctcgaaccctcccggcccgctaacgcgggcctcccatccccccaggggctgcgcccctcggccgcgaacggcctcaccccaaaaatggcagccaagctaggaaaagtcccatgtggatcactccgttgccccgtcgctcaccgtgttggggggaaggtgcacatggctcagttctcaatggaaattatctgcctaaccggctcagttctgcgtagaaaccaacatgcaagctccaccgggtgcaaagcggcagcggcggcaggatatattcaattgtaaatggcttcatgtccgggaaatctacatggatcagcaatgagtatgatggtcaatatggagaaaaagaaagagtaattaccaattttttttcaattcaaaaatgtagatgtccgcagcgttattataaaatgaaagtacattttgataaaacgacaaattacgatccgtcgtatttataggcgaaagcaataaacaaattattctaattcggaaatctttatttcgacgtgtctacattcacgtccaaatgggggcttagatgagaaacttcacgatcgatgcggccaccactcgagaagcttactagtcaacaattggccaatctttgttctaaattgctaataaacgaccatttccgtcaattctccttggttgcaacagtctacccgtcaaatgtttactaatttataagtgtgaagtttgaattatgaaagacgaaatcgtattaaaaattcacaagaataaacaactccatagattttcaaaaaaacagtcacgagaaaaaaaccacagtccgtttgtctgctcttctagtttttattatttttctattaatagttttttgttatttcgagaataaaatttgaacgatgtccgaaccacaaaagccgagccgataaatcctaagccgagcctaactttagccgtaaccatcagtcacggctcccgggctaattcatttgaaccgaatcataatcaacggtttagatcaaactcaaaacaatctaacggcaacatagacgcgtcggtgagctaaaaagagtgtgaaagccaggtcaccatagcattgtctctcccagattttttatttgggaaataatagaagaaatagaaaaaaataaaagagtgagaaaaatcgtagagctatatattcgcacatgtactcgtttcgctttccttagtgttagctgctgccgctgttgtttctcctccatttctctatctttctctctcgctgcttctcgaatcttctgtatcatcttcttcttcttcaaggtgagtctctagatccgttcgcttgattttgctgctcgttagtcgttattgttgattctctatgccgatttcgctagatctgtttagcatgcgttgtggttttatgagaaaatctttgttttgggggttgcttgttatgtgattcgatccgtgcttgttggatcgatctgagttaattcttaaggtttatgtgttagatctatggagtttgaggattcttctcgcttctgtcgatctctcgctgttatttttgtttttttcagtgaagtgaagttgtttagttcgaaatgacttcgtgtatgctcgattgatctggttttaatcttcgatctgttaggtgttgatgtttacaagtgaattctagtgttttctcgttgagatctgtgaagtttgaacctagttttctcaataatcaacatatgaagcgatgtttgagtttcaataaacgctgctaatcttcgaaactaagttgtgatctgattcgtgtttacttcatgagcttatccaattcatttcggtttcattttactttttttttagtgaaccatggcgcaagttagcagaatctgcaatggtgtgcagaacccatctcttatctccaatctctcgaaatccagtcaacgcaaatctcccttatcggtttctctgaagacgcagcagcatccacgagcttatccgatttcgtcgtcgtggggattgaagaagagtgggatgacgttaattggctctgagcttcgtcctcttaaggtcatgtcttctgtttccacggcgtgcatgcttcatggagcttcatctaggccagctactgccaggaagtctagcgggctcagtggcaccgtgcgcatccctggcgataaaagtatttcacacaggagcttcatgttcggaggacttgctagtggagagacgagaatcactggtttgcttgagggcgaagatgttatcaacaccggtaaggcgatgcaagcaatgggtgccagaatccgaaaagagggcgatacgtggatcatcgacggtgttggtaacggaggattgctcgctcccgaagcgccacttgactttgggaacgcagctacggggtgccgtcttactatgggactggtaggcgtgtatgactttgactctaccttcatcggtgacgcgagcctcactaagagaccaatgggacgagtgctgaatcccctgagggagatgggtgtccaggtgaaatctgaggatggtgatcgtcttccggttactctgcgaggccccaagacccccacgccaatcacgtacagggttccgatggcgtcagcacaggtcaagtcagcggtactcctggcgggcctcaacacacctggaatcacaaccgtgattgaacccatcatgactagagaccacacggagaagatgttgcagggtttcggcgctaatctaacggtcgaaaccgacgccgacggcgtgaggacaatccgcttggagggcagaggtaaactgactggccaagtcatcgatgtgcctggagatccctcgtccacagcgtttcccctcgtagctgcgttgctcgtccctggatctgatgtgacgatcctgaatgtcctcatgaatccaactagaaccggcctcatcctcacattgcaggagatgggtgctgacatcgaggttatcaatcctaggttggcaggtggagaggatgtggccgatctgcgcgtgcgttctagtacactcaaaggcgtgaccgtccctgaggatcgcgctccatccatgatcgacgagtaccccattctcgccgttgctgctgcgtttgccgagggcgcaactgtaatgaacggccttgaggagttgagggttaaggagagtgacaggctgtccgcggtggcgaatggcctgaagctaaacggcgtggactgcgacgaaggtgaaacgtcccttgtagtccgtggtcgcccagacgggaaggggttggggaatgcttcgggagctgctgtggcgacgcaccttgatcatagaatcgccatgtcatttctggtgatgggacttgtctccgagaatccggtgaccgttgacgatgctaccatgatcgccacctcctttcctgagttcatggacctcatggcaggcttgggggccaagatcgagctgtctgatactaaggccgcttgaattcccgatcgttcaaacatttggcaataaagtttcttaagattgaatcctgttgccggtcttgcgatgattatcatataatttctgttgaattacgttaagcatgtaataattaacatgtaatgcatgacgttatttatgagatgggtttttatgattagagtcccgcaattatacatttaatacgcgatagaaaacaaaatatagcgcgcaaactaggataaattatcgcgcgcggtgtcatctatgttactagatcggggatcccacgtgcggaccgcctgcaggccgcgttatcaagctaactgca
